(19) United States
(12) Patent Application Publication
(10) Pub. No.: US 2020/0032270 A1
(43) Pub. Date: Jan. 30, 2020

(54) NUCLEIC ACID CAPABLE OF INHIBITING EXPRESSION OF MASP2

(71) Applicant: KYOWA KIRIN CO., LTD., Tokyo (JP)

(72) Inventors: Kazuhiro MASUDA, Tokyo (JP); Yoji YAMADA, Tokyo (JP); Hiroto IWAI, Tokyo (JP); Yuya ISODA, Tokyo (JP); Wen PIAO, Tokyo (JP)

(73) Assignee: KYOWA KIRIN CO., LTD., Tokyo (JP)

(21) Appl. No.: 16/491,410

(22) PCT Filed: Mar. 7, 2018
(86) PCT No.: PCT/JP2018/008788

§ 371 Date: Sep. 5, 2019

(30) Foreign Application Priority Data
Mar. 9, 2017 (JP) 2017-045226

(51) Int. Cl. C12N 15/113

(52) U.S. Cl. CPC C12N 15/1137; C12N 2310/322; C12N 2310/14

(57) ABSTRACT

The present invention provides a nucleic acid having activity to suppress expression of MASP2, a pharmaceutical composition comprising the nucleic acid, and a prophylactic or therapeutic drug containing the nucleic acid for autoimmune diseases such as APS, SLE and the like and thrombosis in hemodialysis.

### TECHNICAL FIELD

[0001] The present invention relates to a nucleic acid for use in suppressing expression of MASP2 or a pharmaceutical composition comprising the nucleic acid.

### BACKGROUND ART

[0002] Mannan-binding lectin serine protease 2 (MASP2) is a protein composed of 686 amino acids, and is constituted of CUB domain-EGF domain-CUB domain-CCP1-CCP2-serine protease domain from the N-terminal side. MASP2 is one of the complement proteins produced in the liver and is involved in the activation of lectin pathway among the complement pathways (non-patent document 1).

[0003] As for the association with diseases, MASP2 is considered 20 to be an important disease-related protein in autoimmune diseases involving complements such as IgA nephropathy, membranous nephropathy, Lupus nephropathy, C3 nephropathy, thrombotic thrombocytopenic purpura, thrombotic microangiopathy and atypical hemolytic uremic syndrome (aHUS) (non-patent 25 documents 2, 3). MASP2 has been reported to be one of the causes of tissue injury during ischemia-reperfusion injury, and it is strongly suggested from studies using animal models and clinical studies that kidney disorder during ischemia and tissue injury during cerebral infarction can be reduced by 30 inhibiting MASP2 (non-patent documents 4, 5). It is expected that the above-mentioned diseases can be prevented or treated by specifically inhibiting MASP2; however, no drug has been reported to date that specifically inhibits expression of MASP2.

[0004] As a method of suppressing expression itself of genes, a method utilizing, for example, RNA interference (hereinafter to be referred to as RNAi) and the like are known. To be specific, it was found that expression of a target gene is specifically suppressed by introducing a double-stranded RNA having the same sequence as the target gene and the RNA is named as short interfering RNA (siRNA) (patent document 1). As a method of suppressing expression of gene besides RNA interference, moreover, an antisense method is known (patent document 2). However, a siRNA sequence that has been shown to effectively suppress human MASP2 gene is not known.

### DOCUMENT LIST

### Patent Documents

[0005] patent document 1: WO 2001/75164
[0006] patent document 2: WO 98/56905

### Non-Patent Document

[0007] non-patent document 1: Immunobiology, 205, 455-466 (2002)
[0008] non-patent document 2: Nat Rev Nephrol., 12, 383-401 (2016)
[0009] non-patent document 3: Nephrol Dial Transplant., 13, 1984-1990 (1998)
[0010] non-patent document 4: FASEB J., 28, 3996-4003 (2014)
[0011] non-patent document 5: J Neuroinflammation., 13, 213 (2016)

### SUMMARY OF THE INVENTION

### Problems to be Solved by the Invention

[0012] The present invention aims to provide a nucleic acid capable of suppressing expression of MASP2. The present invention also aims to provide a pharmaceutical composition for the prophylaxis or treatment of diseases associated with MASP2 expression.

### Means of Solving the Problems

[0013] The present invention relates to the following (1) to (16).

(1) A double-stranded nucleic acid that decreases expression of MASP2 gene, which consists of a sense strand and an antisense strand, and comprises a double-stranded region of at least 11 base pairs, wherein an oligonucleotide strand having a strand length of at least 17 nucleotides and 30 nucleotides at most in the aforementioned antisense strand is complementary to a target MASP2 mRNA sequence selected from the group described in Table 1-1 to Table 1-22.
(2) The double-stranded nucleic acid of (1), wherein the aforementioned double-stranded region is composed of 11-27 base pairs, and the 2nd nucleotide from the 5′-terminus of the aforementioned antisense strand complementary to the target MASP2 mRNA sequence selected from the group described in Tables 1-1 to Table 1-22 is complement to the 2nd ribonucleotide from the 3′-terminus of the target MASP2 mRNA sequence.
(3) The double-stranded nucleic acid of (1) or (2), wherein the 3′-terminus of the aforementioned sense strand and the 5′-terminus of the aforementioned antisense strand form a blunt end.
(4) The double-stranded nucleic acid of (3), wherein the aforementioned sense strand is 21 nucleotides in length and the aforementioned antisense strand is 23 nucleotides in length.
(5) The double-stranded nucleic acid of (1) or (2), wherein the aforementioned sense strand is 21 nucleotides in length and the aforementioned antisense strand is 21 nucleotides in length.
(6) The double-stranded nucleic acid of (5), wherein the 3′-terminal of the aforementioned sense strand and the 3′-terminal of the aforementioned antisense strand have an overhang.
(7) The double-stranded nucleic acid of any one of (1) to (6), wherein the aforementioned antisense strand comprises a sequence selected from the groups described in “antisense strand” in Table 1-1 to Table 1-22 and Table 2.
(8) The double-stranded nucleic acid of any one of (1) to (6), wherein the aforementioned sense strand comprises a sequence selected from the groups described in “sense strand” in Table 1-1 to Table 1-22 and Table 2.
(9) The double-stranded nucleic acid of any one of (1) to (6), comprising a sequence of 1 pair of sense strand/antisense strand selected from the group consisting of the sense strands/antisense strands described in Table 1-1 to Table 1-22 and Table 2.
(10) The double-stranded nucleic acid of any one of the aforementioned (1) to (9), comprising a 2′-modified nucleotide.
(11) The double-stranded nucleic acid of aforementioned (10), wherein 50-100% of the nucleotides in the double strand region are 2′-modified nucleotides.
(12) The double-stranded nucleic acid of any one of (1) to (11), comprising a ligand.
(13) A single strand nucleic acid consisting only of an antisense strand in the double-stranded nucleic acid of any one of (1) to (12).
(14) A pharmaceutical composition comprising the nucleic acid of any one of (1) to (13).
(15) A method of treating a disorder mediated by abnormal complement lectin pathway, comprising a step of administering a therapeutically effective amount of the nucleic acid of any one of (1) to (13) or the pharmaceutical composition of (14) to a human in need of such treatment.
(16) The method of (15), wherein the aforementioned disorder is IgA nephropathy, membranous nephropathy, lupus nephropathy, C3 nephropathy, thrombotic thrombocytopenic purpura, thrombotic microangiopathy, atypical hemolytic uremic syndrome (aHUS), kidney disorder during ischemia or tissue injury during cerebral infarction.

### Effect of the Invention

[0014] Expression of MASP2 can be suppressed by administering the nucleic acid of the present invention or pharmaceutical composition comprising the nucleic acid. Particularly, it is useful for the treatment or prophylaxis of a disease associated with the expression of MASP2.

### DESCRIPTION OF EMBODIMENTS

[0015] As a MASP2 gene (gene encoding MASP2) targeted by the nucleic acid of the present invention, a gene producing a full-length mRNA of MASP2 corresponding to MASP2 cDNA (SEQ ID NO: 2827) registered as Genbank Accession No. NM_006610.3 can be mentioned.

[0016] In addition, mRNA of MASP2 gene of biological species other than human can also be a target gene of the nucleic acid of the present invention. For example, Genbank Accession No. NM_001003893.2 can be recited as a cDNA base sequence corresponding to the full-length mRNA of mouse MASP2 gene. Genbank Accession No. NM_172043.1 can be recited as a cDNA base sequence corresponding to the full-length mRNA of rat MASP2 gene. Genbank Accession No. XM-005544812.2 can be recited as a cDNA base sequence corresponding to the full-length mRNA of cynomolgus monkey CFB gene. Genbank Accession No. XM-001118827.3 and the like can be recited as a cDNA base sequence corresponding to the full-length mRNA of rhesus monkey CFB gene.

### 1. Nucleic Acid of the Present Invention

[0017] In the present invention, a nucleic acid comprising a nucleotide sequence complementary to MASP2 mRNA is referred to as an antisense strand nucleic acid, and a nucleic acid comprising a nucleotide sequence complementary to a nucleotide sequence of an antisense strand nucleic acid is also referred to as a sense strand nucleic acid. In the present specification, unless otherwise specified, “the nucleic acid of the present invention” is used to encompass antisense strand nucleic acid, sense strand nucleic acid, and double-stranded nucleic acid pairing a sense strand and an antisense strand nucleic acid.

[0018] The nucleic acid of the present invention may be any molecule as long as it is a molecule wherein nucleotide or molecule having equivalent function as that of the nucleotide are polymerized. Examples of thereof include RNA which is a polymer of ribonucleotide, DNA which is a polymer of deoxyribonucleotide, chimeric nucleic acid composed of RNA and DNA, and nucleotide polymer wherein at least one nucleotide of these nucleic acids is substituted by a molecule having equivalent function as that of nucleotide. In addition, a derivative containing at least one molecule having equivalent function as that of the nucleotide in these nucleic acids is also encompassed in the nucleic acid of the present invention. Uracil (U) can be unambiguously read as thymine (T).

[0019] Examples of the molecule having equivalent function as that of the nucleotide include nucleotide derivatives and the like. The nucleotide derivative may be any molecule as long as it is a molecule obtained by modifying nucleotide. For example, a molecule obtained by modifying ribonucleotide or deoxyribonucleotide and the like to improve or stabilize nuclease resistance, enhance affinity for complementary strand nucleic acid, enhance cell permeability or visualize same, as compared to RNA or DNA, are preferably used.

[0020] Examples of the molecule obtained by modifying a nucleotide include sugar moiety-modified nucleotide, phosphodiester bond-modified nucleotide, base-modified nucleotide, a nucleotide wherein at least one of a sugar moiety, a phosphodiester bond and a base is modified and the like.

[0021] While the sugar moiety-modified nucleotide may be any as long as the chemical structure of sugar of nucleotide is partly or entirely modified or substituted by any substituent, or substituted by any atom, 2′-modified nucleotide is preferably used.

[0022] Examples of the 2′-modified nucleotide include a nucleotide wherein 2′—OH group of ribose is substituted by a substituent selected from H, OR, R, R′ OR, SH, SR, NH₂, NHR, NR₂, N₃, CN, F, Cl, Br and I (R is alkyl or aryl, preferably alkyl having 1-6 carbon atoms, R′ is alkylene, preferably alkylene having 1-6 carbon atoms), preferably a nucleotide wherein 2′-OH group is substituted by H, F or methoxy group, more preferably a nucleotide wherein 2′—OH group is substituted by F or methoxy group. In addition, a nucleotide wherein 2′-OH group is substituted by a substituent selected from the group consisting of 2-(methoxy)ethoxy group, 3-aminopropoxy group, 2-[(N,N-dimethylamino)oxy]ethoxy group, 3-(N,N-dimethylamino)propoxy group, 2-[2-(N,N-dimethylamino)ethoxy]ethoxy group, 2-(methylamino)-2-oxoethoxy group, 2-(N-methylcarbamoyl)ethoxy group and 2-cyanoetoxy group, and the like can also be mentioned.

[0023] The 2′-modified nucleotide is preferably contained at 50-100%, more preferably 70-100%, further preferably 90-100%, relative to the nucleotide in a double-stranded nucleic acid region.

[0024] As the double-stranded nucleic acid to which 2′-modified nucleotides are applied, for example, a double-stranded nucleic acid composed of a pair of sense strand/antisense strand sequences selected from the group consisting of the sense strands/antisense strands described in Table 2 can be mentioned. In Table 2, N(M) shows 2′-O-methyl-RNA and N(F) shows 2′-F-RNA. Here, N shows A, C, G or U.

[0025] As the sugar moiety modified nucleotide, a crosslinking structure type artificial nucleic acid having two cyclic structures by introducing a crosslinking structure into the sugar moiety (Bridged Nucleic Acid) (BNA) can be mentioned. Specific examples thereof include locked artificial nucleic acid wherein the 2′-position oxygen atom and the 4′-position carbon atom are crosslinked via methylene (Locked Nucleic Acid) (LNA), ethylene crosslinking structure type artificial nucleic acid (Ethylene bridged nucleic acid) (ENA) [Nucleic Acid Research, 32, e175(2004)], Constrained Ethyl (cEt)[The Journal of Organic Chemistry 75, 1569 (2010)], Amido-Bridged Nucleic Acid (AmNA)[Chem Bio Chem 13, 2513 (2012)] and 2′-0,4′-C-Spirocyclopropylene bridged nucleic acid (scpBNA)[Chem. Commun., 51, 9737 (2015)] and the like, and further, peptide nucleic acid (PNA) [Acc. Chem. Res., 32, 624 (1999)], oxy-peptide nucleic acid (OPNA) [J. Am. Chem. Soc., 123, 4653 (2001)], peptide ribonucleic acid (PRNA) [J. Am. Chem. Soc., 122, 6900 (2000)] and the like.

[0026] The phosphodiester bond-modified nucleotide may be any as long as the chemical structure of the phosphodiester bond is partly or entirely modified or substituted by any substituent, or substituted by any atom. Examples thereof include a nucleotide wherein phosphodiester bond is substituted by phosphorothioate bond, a nucleotide wherein phosphodiester bond is substituted by phosphorodithioate bond, a nucleotide wherein phosphodiester bond is substituted by alkylphosphonate bond, a nucleotide wherein phosphodiester bond is substituted by phosphoramidate bond and the like.

[0027] The base-modified nucleotide may be any as long as the chemical structure of the base of the nucleotide is partly or entirely modified or substituted by any substituent, or substituted by any atom. Examples thereof include one wherein oxygen atom in the base is substituted by sulfur atom, one wherein hydrogen atom is substituted by alkyl group having 1-6 carbon atoms, halogen and the like, one wherein methyl group is substituted by hydrogen, hydroxymethyl, alkyl group having 2-6 carbon atoms and the like, and one wherein amino group is substituted by alkyl group having 1-6 carbon atoms, alkanoyl group having 1-6 carbon atoms, oxo group, hydroxy group, and the like. Use of 5-methylcytosine (5-mC) as a base-modified nucleotide instead of cytosine (C) is also one of the preferable forms of the present invention.

[0028] As the nucleotide derivative, one obtained by adding directly or via linker other chemical substance such as ligand, for example, lipids such as cholesterol, fatty acid, tocopherol, retinoid and the like, saccharides such as N-acetylgalactosamine (GalNAc), galactose (Gal), mannose (Man) and the like, fragment antibodies such as full antibody, Fab, scFv, VHH and the like, proteins such as low-density lipoprotein (LDL), human serum albumin and the like, peptides such as RGD, NGR, R9, CPP and the like, small molecules such as phenazine, phenanthridine, anthraquinone, folic acid and the like, synthesized polymers such as synthetic polyamino acid and the like, nucleic acid aptamers, dyes such as acridine, fluorescein, rhodamine, coumarin and the like, fluorophores such as Cy3 series, Alexa series, Black Hole Quencher and the like, or the like to a nucleotide or a nucleotide derivative wherein at least one of sugar moiety, phosphodiester bond and base is modified can also be mentioned. Specifically, polyamine-added nucleotide derivative, cholesterol-added nucleotide derivative, steroid-added nucleotide derivative, GalNAc-added nucleotide derivative, bile acid-added nucleotide derivative, fatty acid-added nucleotide derivative, vitamin-added nucleotide derivative, Cy5-added nucleotide derivative, Cy3-added nucleotide derivative, 6-FAM-added nucleotide derivative and biotin-added nucleotide derivative and the like can be mentioned, and GalNAc-added nucleotide derivative can be preferably mentioned. It is possible to provide a modification on the 5′-terminus, the 3′-terminus or/and an inner portion of the sequence by reacting, during elongation reaction on a solid phase, a modifier capable of reaction on the solid phase. A nucleotide derivative can also be obtained by synthesizing and purifying, in advance, a nucleic acid introduced with a functional group such as amino group, mercapto group, azido group, triple bond and the like, and reacting same with a modifier.

[0029] The nucleotide derivative may form a crosslinking structure, such as alkylene structure, peptide structure, nucleotide structure, ether structure, ester structure, a structure of a combination of at least one of these and the like, with other nucleotide or nucleotide derivative in the nucleic acid.

[0030] The nucleic acid of the present invention also encompasses a nucleic acid wherein the atoms in a molecule are partly or entirely substituted by an atom (isotope) having a different mass number.

[0031] In the present specification, “complement” means a relationship forming a base pairing between two bases, and refers to a double helix structure as a whole double-stranded region via a loose hydrogen bond, for example, the relationship between adenine and thymine or uracil, and the relationship between guanine and cytosine.

[0032] In the present specification, “complementary” means not only complete complementarity between two nucleotide sequences, but also includes 0-30%, 0-20% or 0-10% of mismatch bases between the nucleotide sequences. For example, an antisense strand complementary to MASP2 mRNA may contain substitution of one or more bases in a nucleotide sequence completely complementary to a partial nucleotide sequence of the mRNA. To be specific, an antisense strand may contain 1-8, preferably 1-6, 1-4, 1-3, particularly 2 or one mismatch base in a target sequence of the target gene. For example, when the antisense strand has 21 bases in length, it may contain 6, 5, 4, 3, 2 or one mismatch base in a target sequence of the target gene, and the position of the mismatch may be the 5′-terminus or 3′-terminus of the sequence.

[0033] In addition, “complementary” encompasses a nucleotide sequence wherein one of the sequences is completely complementary to the other nucleotide sequence, and one or more bases are added and/or deleted. For example, MASP2 mRNA and the antisense strand nucleic acid of the present invention may contain 1 or 2 bulge bases in an antisense strand and/or target MASP2 mRNA region due to the addition and/or deletion of base in the antisense strand.

[0034] The nucleic acid of the present invention may be constituted of any nucleotide or a derivative thereof as long as it is a nucleic acid containing a nucleotide sequence complementary to a part of the nucleotide sequence of MASP2 mRNA and/or a nucleic acid containing a nucleotide sequence complementary to the nucleotide sequence of the nucleic acid. The double-stranded nucleic acid of the present invention may have any length as long as a nucleic acid containing a nucleotide sequence complementary to the target MASP2 mRNA sequence and a nucleic acid containing a nucleotide sequence complementary to the nucleotide sequence of the nucleic acid can form a double strand. The length of the sequence capable of forming a double strand is generally 11-35 bases, preferably 15-30 bases, more preferably 17-25 bases, further preferably 17-23 bases, particularly preferably 19-23 bases. It is also preferable that the sequence consists of 21-23 bases.

[0035] As the antisense strand nucleic acid of the present invention, a nucleic acid containing a nucleotide sequence complementary to the target MASP2 mRNA sequence is used, wherein 1-3 bases, preferably 1-2 bases, more preferably 1 base, in the nucleic acid may be deleted, substituted or added.

[0036] As a nucleic acid that suppresses expression of MASP2, a single strand nucleic acid containing a nucleotide sequence complementary to the target MASP2 mRNA sequence and capable of suppressing the expression of MASP2, or a double-stranded nucleic acid consisting of a nucleic acid containing a nucleotide sequence complementary to the target MASP2 mRNA sequence and a nucleic acid containing a nucleotide sequence complementary to the nucleotide sequence of the nucleic acid, and capable of suppressing the expression of MASP2 is preferably used.

[0037] In the present invention, a double-stranded nucleic acid refers to a nucleic acid wherein two nucleotide strands are paired to form a double-stranded region. The double-stranded region refers to a portion in which a nucleotide or a derivative thereof constituting a double-stranded nucleic acid constitutes a base pair to form a double strand. The double-stranded region generally contains 11-27 base pairs, preferably 15-25 base pairs, more preferably 15-23 base pairs, further preferably 17-21 base pairs, particularly preferably 17-19 base pairs.

[0038] A single strand nucleic acid constituting a double-stranded nucleic acid generally consists of 11-30 bases, preferably 15-29 bases, more preferably 15-27 bases, further preferably 15-25 bases, particularly preferably 17-23 bases, most preferably 19-23 bases. It is also preferable that it consists of 21-23 bases.

[0039] When the double-stranded nucleic acid of the present invention has an additional nucleotide or nucleotide derivative that does not form a double strand on the 3′-side or 5′-side next to a double-stranded region, it is called an overhang. When an overhang is present, a nucleotide constituting the overhang may be ribonucleotide, deoxyribonucleotide or a derivative thereof.

[0040] As a double-stranded nucleic acid having an overhang, one having an overhang of 1-6 bases, generally 1-3 bases, preferably one having an overhang of 2 bases, for example, overhang composed of dTdT or UU, on the 3′-terminus or 5′-terminus of at least one of the strands is used. The overhang may be present in an antisense strand alone, a sense strand alone, or both an antisense strand and a sense strand. In the present invention, a double-stranded nucleic acid having overhang in both an antisense strand and a sense strand is preferably used. In the antisense strand, an oligonucleotide strand consisting of at least 17 nucleotides and 30 nucleotides at most and comprising a double-stranded region and a subsequent overhang is sufficiently complementary to a target MASP2 mRNA sequence selected from the group described in Table 1-1 to Table 1-22 and Table 2. As the double-stranded nucleic acid of the present invention, moreover, a nucleic acid molecule generating the above-mentioned double-stranded nucleic acid by the action of a ribonuclease such as Dicer and the like (WO2005/089287), a double-stranded nucleic acid forming a blunt end without having an overhang on the 3′-terminus or 5′-terminus, a double-stranded nucleic acid with an overhang of a sense strand or antisense strand alone (US2012/0040459) and the like can also be used.

[0041] As the double-stranded nucleic acid of the present invention, a nucleic acid consisting of the same sequence as a nucleotide sequence of the target gene or a nucleotide sequence of a complementary strand thereof may be used, or a double-stranded nucleic acid consisting of a nucleic acid wherein 1-4 bases on the 5′-terminus or 3′-terminus of at least one of the strands of the nucleic acid is deleted, and a nucleic acid containing a nucleotide sequence complementary to a nucleotide sequence of the nucleic acid may be used.

[0042] The double-stranded nucleic acid of the present invention may be a double-stranded RNA (dsRNA) wherein RNAs form a double strand, a double-stranded DNA (dsDNA) wherein DNAs form a double strand, or a hybrid nucleic acid wherein RNA and DNA form a double strand. Alternatively, one or both of the strands of the double strand may be a chimeric nucleic acid of DNA and RNA. Preferred is a double-stranded RNA (dsRNA).

[0043] The 2nd nucleotide from the 5′-terminus of the antisense strand of the present invention is preferably complement to the 2nd ribonucleotide from the 3′-terminus of the target MASP2 mRNA sequence, the 2-7th nucleotides from the 5′-terminus of the antisense strand is more preferably completely complement to the 2-7th ribonucleotides from the 3′-terminus of the target MASP2 mRNA sequence, and the 2-11th nucleotides from the 5′-terminus of the antisense strand is further preferably completely complement to the 2-11th ribonucleotides from the 3′-terminus of the target MASP2 mRNA sequence. In addition, the 11th nucleotide from the 5′-terminus of the antisense strand of the nucleic acid of the present invention is preferably complement to the 11th ribonucleotide from the 3′-terminus of the target MASP2 mRNA sequence, the 9-13th nucleotides from the 5′-terminus of the antisense strand is more preferably completely complement to the 9-13th ribonucleotides from the 3′-terminus of the target MASP2 mRNA sequence, and the 7-15th nucleotides from the 5′-terminus of the antisense strand is further preferably completely complement to the 7-15th ribonucleotides from the 3′-terminus of the target MASP2 mRNA sequence.

[0044] A method of producing the nucleic acid of the present invention is not particularly limited, and a method using a known chemical synthesis, or an enzymatic transcription method and the like can be mentioned. As a method using a known chemical synthesis, a phosphoramidite method, a phosphorothioate method, a phosphotriester method, a CEM method [Nucleic Acid Research, 35, 3287 (2007)] and the like can be mentioned and, for example, it can be synthesized by ABI3900 High Throughput nucleic acid synthesizer (manufactured by Applied Biosystems). After completion of the synthesis, desorption from a solid phase, removal of a protecting group, purification of the object product and the like are performed. It is desirable to obtain a nucleic acid having purity of not less than 90%, preferably not less than 95%, by purification. In the case of a double-stranded nucleic acid, synthesized and purified sense strand and antisense strand are mixed at a suitable ratio, for example, 0.1-10 equivalents, preferably 0.5-2 equivalents, more preferably 0.9-1.1 equivalents, further preferably an equivalent molar quantity, of sense strand per 1 equivalent of antisense strand, and may be used after annealing, or directly used without a step of annealing the mixture. Annealing may be performed under any conditions as long as a double-stranded nucleic acid can be formed. It is generally performed by mixing almost equivalent molar quantities of sense strand and antisense strand, heating same at about 94° C. for about 5 min and slowly cooling to room temperature. As an enzymatic transcription method for producing the nucleic acid of the present invention, a method using a plasmid or DNA having the object nucleotide sequence as a template, and including transcription using phage RNA polymerase, for example, T7, T3, or SP6RNA polymerase, can be mentioned.

[0045] The nucleic acid of the present invention can be introduced into a cell by using a carrier for transfection, preferably a cationic carrier such as cationic liposome and the like. Also, it can be directly introduced into a cell by a calcium phosphate method, an electroporation method, a microinjection method and the like.

[0046] In the nucleic acid of the present invention, the 5′-terminus, the 3′-terminus or/and an inner portion of sequence may be modified by one or more ligands and fluorophores, and a nucleic acid modified by a ligand or fluorophore is also called a conjugate nucleic acid. It is possible to provide a modification on the 5′-terminus, the 3′-terminus or/and an inner portion of sequence by reacting, during elongation reaction on a solid phase, a modifier capable of reaction on the solid phase. A conjugate nucleic acid can also be obtained by synthesizing and purifying, in advance, a nucleic acid introduced with a functional group such as amino group, mercapto group, azido group, triple bond and the like, and reacting same with a modifier. While the ligand may be a molecule having affinity for a biological molecule, for example, lipids such as cholesterol, fatty acid, tocopherol, retinoid and the like, saccharides such as N-acetylgalactosamine (GalNAc), galactose (Gal), mannose (Man) and the like, antibodies such as full antibody, Fab, VHH and the like, proteins such as low-density lipoprotein (LDL), human serum albumin and the like, peptides such as RGD, NGR, R9, CPP and the like, small molecules such as folic acid and the like, synthesis polymers such as synthetic polyamino acid and the like, nucleic acid aptamers and the like can be mentioned, and these can also be used in combination. Examples of the fluorophore include Cy3 series, Alexa series, Black Hole Quencher and the like.

[0047] A vector capable of expressing the nucleic acid of the present invention after introduction into a cell may be used instead of the nucleic acid of the present invention. To be specific, an expression vector is constructed by inserting a sequence encoding the nucleic acid of the present invention into the downstream of a promoter in the expression vector, and introduced into a cell, whereby the nucleic acid and the like can be expressed. Examples of the expression vector include pCDNA6.2-GW/miR (manufactured by Invitrogen), pSilencer 4.1-CMV (manufactured by Ambion), pSINsi-hH1 DNA (manufactured by Takara Bio Inc.), pSINsi-hU6 DNA (manufactured by Takara Bio Inc.), pENTR/U6 (manufactured by Invitrogen) and the like.

[0048] It is also possible to use a recombinant viral vector produced by inserting a sequence encoding the nucleic acid of the present invention into the downstream of a promoter in the expression vector and introducing the vector into a packaging cell. Examples of the viral vector include retroviral vector, lentiviral vector, adenoviral vector, adeno-associated viral vector and the like.

### 2. Nucleic Acid Having Activity to Suppress Expression of MASP2

[0049] The antisense strand and sense strand of the present invention can be designed based on, for example, a nucleotide sequence (SEQ ID NO: 2827) of cDNA (sense strand) of the full length mRNA of human MASP2 registered as Genbank Accession No. NM_006610.3. In addition, antisense and sense strands that suppress expression of MASP2 mRNA in multiple species can also be designed by comparing the base sequence of full length mRNA cDNA of human MASP2 and the base sequence of full length mRNA cDNA of other species.

[0050] As a nucleic acid having an activity to suppress expression of MASP2, a double-stranded nucleic acid having an activity to suppress expression of MASP2, which consists of the antisense strand nucleic acid of the present invention containing a nucleotide sequence complementary to MASP2 mRNA, and the sense strand nucleic acid of the present invention containing a nucleotide sequence complementary to the nucleotide sequence of the nucleic acid, can be mentioned. A single strand nucleic acid constituting the double-stranded nucleic acid generally consists of 11-30 bases, preferably 15-29 bases, more preferably 15-27 bases, further preferably 15-25 bases, particularly preferably 17-23 bases, most preferably 19-21 bases. It may also consist of 19-23 bases, preferably 21-23 bases. The double-stranded nucleic acid has a double-stranded region generally consisting of 15-27 base pairs, preferably 15-25 base pairs, more preferably 15-23 base pairs, further preferably 15-21 base pairs.

[0051] The expression of MASP2 can be suppressed by introducing these double-stranded nucleic acids into a cell. For example, the double-stranded nucleic acid of the present invention introduced into a cell at a concentration of several pM-several nM can suppress expression of MASP2 mRNA when cultured for not less than 24 hrs, for example, for 48 hrs.

[0052] The expression suppressive activity on MASP2 mRNA by the double-stranded nucleic acid of the present invention can be evaluated by transfecting the nucleic acid and the like to a human cell line and the like by using a cationic liposome and the like, culturing same for a given period, and quantifying the expression level of MASP2 mRNA in the human cell line.

[0053] As a nucleic acid having an activity to suppress expression of MASP2 besides the above-mentioned double-stranded nucleic acid, a single strand nucleic acid containing a nucleotide sequence complementary to a part of the nucleotide sequence of MASP2 mRNA, and suppress expression of the MASP2 can be mentioned. While a single strand nucleic acid constituting the nucleic acid generally consists of 8-30 bases, it preferably consists of 12-30 bases, more preferably 12-20 bases. It may also consist of 19-23 bases, preferably 21-23 bases.

[0054] These single strand nucleic acids introduced into the cell can also suppress expression of MASP2. For example, the single strand nucleic acid of the present invention introduced into a cell at a concentration of several pM-several nM can suppress expression of MASP2 mRNA when cultured for not less than 24 hrs, for example, for 48 hrs.

[0055] The expression suppressive activity on MASP2 mRNA by the single strand nucleic acid of the present invention can be evaluated by transfecting the nucleic acid and the like to a human cell line and the like by using a cationic liposome and the like, culturing same for a given period, and quantifying the expression level of MASP2 mRNA in the human cell line.

### 3. Pharmaceutical Composition of the Present Invention

[0056] The present invention also relates to a pharmaceutical composition comprising a nucleic acid such as the above-mentioned double-stranded nucleic acid, single strand nucleic acid and the like as an active ingredient. The pharmaceutical composition of the present invention can be used as a therapeutic or prophylactic agent for autoimmune diseases such as anti-phospholipid antibody syndrome (APS) and systemic lupus erythematosus (SLE), and thrombosis in hemodialysis.

[0057] The pharmaceutical composition of the present invention can be preferably used for the treatment or prophylaxis of diseases relating to the expression of MASP2, particularly, disorders mediated by abnormal complement lectin pathway. In the present specification, the disorders mediated by abnormal complement lectin pathway refer to the above-mentioned autoimmune diseases (e.g., APS, SLE), thrombosis in hemodialysis, IgA nephropathy, membranous nephropathy, Lupus nephropathy, C3 nephropathy, thrombotic thrombocytopenic purpura, thrombotic microangiopathy, atypical hemolytic uremic syndrome (aHUS), kidney disorder during ischemia, tissue injury during cerebral infarction, and the like. Therefore, the pharmaceutical composition of the present invention can be used as an agent for treating or preventing IgA nephropathy, membranous nephropathy, lupus nephropathy, C3 nephropathy, thrombotic thrombocytopenic purpura, thrombotic microangiopathy, atypical hemolytic uremic syndrome (aHUS), kidney disorder during ischemia, tissue injury during cerebral infarction and the like.

[0058] The pharmaceutical composition can further comprise a carrier effective for intracellular transfer of the nucleic acid. Examples of the carrier effective for intracellular transfer of the nucleic acid include cationic carriers. Examples of the cationic carrier include a cationic liposome, a cationic polymer and the like. As a carrier effective for intracellular transfer of the nucleic acid, a carrier utilizing a virus envelope may also be used. As a cationic polymer, JetSI (Qbiogene Inc.), Jet-PEI (polyethyleneimine; Qbiogene Inc.) and the like are preferably used. As a carrier utilizing a virus envelope, GenomeOne (registered trade mark) (HVJ-E liposome; ISHIHARA SANGYO KAISHA, LTD.) and the like are preferably used.

[0059] A composition comprising the nucleic acid of the present invention and the above-mentioned carrier can be prepared by a method known to those of ordinary skill in the art. For example, it can be prepared by mixing a carrier dispersion liquid and a nucleic acid solution at suitable concentrations. When a cationic carrier is used, generally, it can be prepared easily by mixing in an aqueous solution by a conventional method, since a nucleic acid has a negative electric charge in aqueous solutions. Examples of the aqueous solvent used for the preparation of the composition include electrolytic solutions such as water for injection, distilled water for injection, saline and the like, sugar solutions such as glucose solution, maltose solution and the like, and the like. The conditions such as pH and temperature and the like for preparation of the composition can be appropriately selected by those of ordinary skill in the art. Where necessary, the composition can also be formed as a uniform composition by a dispersion treatment using an ultrasonic dispersion apparatus, a high-pressure emulsion apparatus and the like. Since the method and conditions optimal for the preparation of a composition comprising a carrier and a nucleic acid depend on the carrier to be used, those of ordinary skill in the art can select an optimal method for the carrier to be used irrespective of the above-mentioned methods.

[0060] As the pharmaceutical composition of the present invention, a composition constituted of a composite particle comprising a nucleic acid and a lead particle as constituent components and a lipid membrane covering the composite particle can also be used preferably. Examples of the lead particle include a lipid assembly, a liposome, an emulsion particle, a polymer, a metal colloid, a fine particle preparation and the like, and a cationic liposome is preferably used. The lead particle in the present invention may contain a complex of a combination of not less than two from a lipid assembly, a liposome, an emulsion particle, a polymer, a metal colloid, a fine particle preparation and the like as a constituent component, or a complex of a combination of a lipid assembly, a liposome, an emulsion particle, a polymer, a metal colloid, a fine particle preparation and the like and other compound (e.g., sugar, lipid, inorganic compound etc.) as a constituent component.

[0061] Examples of the lipid membrane covering the composite particle include those comprising non-cationic lipid, lipid inhibiting aggregation of particles and cationic lipid and the like as a constituent component.

[0062] The composition can be prepared according to, for example, the method described in WO 2006/080118 and the like.

[0063] A suitable mixing ratio of the nucleic acid and the carrier comprised in the pharmaceutical composition of the present invention is 1-200 parts by weight of a carrier per 1 part by weight of nucleic acid. It is preferably 2.5-100 parts by weight, further preferably 7-25 parts by weight, of a carrier per 1 part by weight of a nucleic acid.

[0064] An average particle size of the pharmaceutical composition of the present invention is preferably about 10 nm-300 nm, more preferably about 30 nm-200 nm, further preferably about 50 nm-150 nm.

[0065] The pharmaceutical composition of the present invention may also comprise a pharmaceutically acceptable carrier, a diluent and the like besides the above-mentioned carrier. A pharmaceutically acceptable carrier, a diluent and the like are essentially chemically-inactive and harmless compositions, and do not at all influence the biological activity of the pharmaceutical composition of the present invention. Examples of the carrier and diluent include, but are not limited to, a salt solution, a sugar solution, a glycerol solution, ethanol and the like.

[0066] The pharmaceutical composition of the present invention comprises the complex in an amount effective for the treatment or prevention of diseases and is provided in a form permitting appropriate administration to patients. The formulation of the pharmaceutical composition of the present invention may be, for example, a liquid such as injection, eye drop, inhalation and the like, for example, an external preparation such as ointment, lotion and the like, and the like.

[0067] In the case of a liquid, the concentration range of the active ingredient in the pharmaceutical composition of the present invention is generally 0.001-25% (w/v), preferably 0.1-10% (w/v), more preferably 0.5-5% (w/v). The pharmaceutical composition of the present invention may comprise an adequate amount of any pharmaceutically acceptable additive, for example, an emulsion adjuvant, a stabilizer, an isotonicifier, a pH adjuster and the like. Any pharmaceutically acceptable additive can be added in a suitable step before or after dispersion of the complex.

[0068] The pH of the liquid is generally adjusted to about 5.0-about 8.5, preferably about 6.0-about 8.0, and preferably subjected to a sterilization treatment such as sterilization by filtration and the like, by using a membrane filter and the like.

[0069] The pharmaceutical composition of the present invention can also be prepared as a freeze-dried preparation. A freeze-dried preparation can be prepared by a dispersion treatment of a nucleic acid and a carrier, followed by a freeze-drying treatment. A freeze-drying treatment can be performed by a conventional method. For example, a given amount of a complex solution after the above-mentioned dispersion treatment is dispensed in a vial container under sterile conditions, predried for about 2 hrs under the condition of about −40° C. to −20° C., primarily predried at about 0-10° C. under reduced pressure, then secondarily dried at about 15-25° C. under reduced pressure to perform freeze-drying. Then, for example, the inside of the vial is substituted with a nitrogen gas and a cap is provided, whereby a freeze-dried preparation of the pharmaceutical composition of the present invention can be obtained.

[0070] The freeze-dried preparation can be used by redissolving by the addition of any suitable solution. Examples of the solution include electrolytic solutions such as water for injection, saline and the like, glucose solution, other general infusions and the like. While the liquid volume of this solution varies depending on the use and the like and is not particularly limited, it is preferably a 0.5- to 2-fold amount of the liquid volume before freeze-drying, or not more than 500 ml.

[0071] The pharmaceutical composition of the present invention can be administered to animals including human by, for example, intravenous administration, intraarterial administration, oral administration, tissue administration, transdermal administration, transmucosal administration or rectal administration, and is preferably administered by an appropriate method according to the symptom of the patient. Particularly, intravenous administration, transdermal administration, and transmucosal administration are preferably used. In addition, topical administration such as topical administration to a cancer site and the like can also be employed. Examples of the dosage form suitable for these administration methods include various injections, oral preparations, drip infusions, absorbents, eye drops, ointments, lotions, suppositories and the like.

[0072] While the dose of the pharmaceutical composition of the present invention is desirably determined in consideration of nucleic acid, dosage form, condition of patient such as age, body weight and the like, administration route, nature and severity of the disease and the like, it is generally 0.1 mg-10 g/day, preferably 1 mg-500 mg/day, for an adult in the mass of the nucleic acid. In some cases, a dose below these levels may be sufficient, or a dose above these levels may be conversely required. The pharmaceutical composition can be administered one to several times per day, or can be administered at one to several day intervals.

### 4. Treatment Method

[0073] The present invention further provides a method for treating diseases related to disorders mediated by abnormal complement lectin pathway, including a step of administering a therapeutically effective amount of the nucleic acid of the present invention or the pharmaceutical composition of the present invention to a human in need of such treatment (treatment method of the present invention).

[0074] The treatment method of the present invention is preferably a method of treating diseases such as IgA nephropathy, membranous nephropathy, lupus nephropathy, C3 nephropathy, thrombotic thrombocytopenic purpura, thrombotic microangiopathy, atypical hemolytic uremic syndrome (aHUS), kidney disorder during ischemia, tissue injury during cerebral infarction and the like, and is characterized by administering a therapeutically effective amount of the nucleic acid of the present invention or the pharmaceutical composition of the present invention to a human in need of such treatment. Other steps and conditions are not limited in any manner.

[0075] In the treatment method of the present invention, for example, the administration method, dose, preparation method and the like of the aforementioned pharmaceutical composition of the present invention can be used.

[0076] The present invention is explained in the following by referring to Examples, which are not to be construed as limitative.

### Example 1

[0077] Measurement of Knockdown Activity of MASP2 mRNA in Human Cell

[0078] HepG2/C3A cells (obtained from ATCC, ATCC number: CRL-10741), which is a cell line derived from human liver cancer, were seeded to a 96-well culture plate at 10,000 cells/80 μL/well. As the medium, MEM medium (Nacalai Tesque manufactured by, catalog No.: 21442-25) containing 10% fetal bovine serum (FBS), 1 mM sodium pyruvate (manufactured by Nacalai Tesque, catalog No.: 06977-34), 1% MEM Non-Essential Amino Acids (manufactured by Thermo Fisher Scientific, catalog No.: 11140-050) was used. As the double stranded nucleic acids, those described in Table 1-1 to Table 1-22 and synthesized by Sigma-Aldrich were used. Specifically, they are constituted of double-stranded nucleic acids obtained by annealing sense strands consisting of the ribonucleotide shown in SEQ ID NO: 1-942 and antisense strands consisting of the ribonucleotide shown in SEQ ID NO: 943-1884 (sense strand shown in SEQ ID NO: n (n=1-942) and antisense strand shown in SEQ ID NO: [n+942] form a pair). A double-stranded nucleic acid described in Table 1-1 to Table 1-22 and an RNAiMax transfection reagent (manufactured by Thermo Fisher Scientific, catalog No.: 13778-150) were diluted with Opti-MEM medium (manufactured by Thermo Fisher Scientific, catalog No. 31985-070), and 20 μL of each siRNA/RNAiMax mixture was added to 96-well culture plate to the final concentration of double-stranded nucleic acid of 10 nM, and the mixture was cultured under the conditions 37° C., 5% CO₂ for 24 hrs. Thereafter, the cells were washed with PBS (phosphate buffered saline), and cDNA was synthesized from each plate by using SuperPrep (registered trade mark) Cell Lysis & RT Kit for qPCR kit (manufactured by Toyobo, catalog No.: SCQ-101) and according to the method described in the manual attached to the product. The cDNA (4 μL) was added to MicroAmp Optical 384-well plate (manufactured by Applied Biosystems, catalog No. 4309849), and 10 μL of TaqMan (registered trade mark) Gene Expression Master Mix (manufactured by Applied Biosystems, catalog No. 4369016), 4 μL of UltraPure Distilled Water (manufactured by Thermo Fisher Scientific, catalog No.: 10977-015), 1 μL of human MASP2 probe (manufactured by Applied Biosystems, Hs00198244 m1), and 1 μL of human GAPDH probe (manufactured by Applied Biosystems, Hs02786624_g1) were further added. The real-time PCR of human MASP2 gene and human GAPDH (D-glyceraldehyde-3-phosphate dehydrogenase) gene was performed by using the QuantStudio (registered trade mark) 12K Flex real-time PCR system. GAPDH is a constitutively expressed gene and was measured as the internal control, and the MASP2 expression level was normalized. The MASP2 mRNA relative expression level when each double stranded nucleic acid was introduced was calculated relative to the MASP2 mRNA amount when HepG2/C3A cells were treated with a transfection reagent alone without addition of siRNA as 1.0. This experiment was performed 2 or 3 times and the mean of the MASP2 mRNA relative expression level is shown in Table 1-1 to Table 1-22. In the column of note in Table 1-1 to Table 1-22, * shows mean of two experiments and other shows mean of three experiments.

TABLE 1-1

| double | | | | |
|---|---|---|---|---|
| stranded | | | | antisense strand |
| nucleic acid | SEQ ID | sense strand sequence | SEQ ID | sequence |
| number | NO: | (5′--->3′) | NO: | (5′--->3′) |
| MA0001 | SEQ ID | CAGGCCAGGCCAGCUGGACGG | SEQ ID | GUCCAGCUGGCCUGGCCUGGU |
| | NO: 1 | | NO: 943 | |
| MA0002 | SEQ ID | GCCAGGCCAGCUGGACGGGCA | SEQ ID | CCCGUCCAGCUGGCCUGGCCU |
| | NO: 2 | | NO: 944 | |
| MA0003 | SEQ ID | CAGGCCAGCUGGACGGGCACA | SEQ ID | UGCCCGUCCAGCUGGCCUGGC |
| | NO: 3 | | NO: 945 | |
| MA0004 | SEQ ID | AGGCCAGCUGGACGGGCACAC | SEQ ID | GUGCCCGUCCAGCUGGCCUGG |
| | NO: 4 | | NO: 946 | |
| MA0005 | SEQ ID | GGCCAGCUGGACGGGCACACC | SEQ ID | UGUGCCCGUCCAGCUGGCCUG |
| | NO: 5 | | NO: 947 | |
| MA0006 | SEQ ID | CAGCUGGACGGGCACACCAUG | SEQ ID | UGGUGUGCCCGUCCAGCUGGC |
| | NO: 6 | | NO: 948 | |
| MA0007 | SEQ ID | AGCUGGACGGGCACACCAUGA | SEQ ID | AUGGUGUGCCCGUCCAGCUGG |
| | NO: 7 | | NO: 949 | |
| MA0008 | SEQ ID | CUGGACGGGCACACCAUGAGG | SEQ ID | UCAUGGUGUGCCCGUCCAGCU |
| | NO: 8 | | NO: 950 | |
| MA0009 | SEQ ID | GGACGGGCACACCAUGAGGCU | SEQ ID | CCUCAUGGUGUGCCCGUCCAG |
| | NO: 9 | | NO: 951 | |
| MA0010 | SEQ ID | ACGGGCACACCAUGAGGCUGC | SEQ ID | AGCCUCAUGGUGUGCCCGUCC |
| | NO: 10 | | NO: 952 | |
| MA0011 | SEQ ID | CGGGCACACCAUGAGGCUGCU | SEQ ID | CAGCCUCAUGGUGUGCCCGUC |
| | NO: 11 | | NO: 953 | |
| MA0012 | SEQ ID | GGGCACACCAUGAGGCUGCUG | SEQ ID | GCAGCCUCAUGGUGUGCCCGU |
| | NO: 12 | | NO: 954 | |
| MA0013 | SEQ ID | GGCACACCAUGAGGCUGCUGA | SEQ ID | AGCAGCCUCAUGGUGUGCCCG |
| | NO: 13 | | NO: 955 | |
| MA0014 | SEQ ID | CCAUGAGGCUGCUGACCCUCC | SEQ ID | AGGGUCAGCAGCCUCAUGGUG |
| | NO: 14 | | NO: 956 | |
| MA0015 | SEQ ID | CAUGAGGCUGCUGACCCUCCU | SEQ ID | GAGGGUCAGCAGCCUCAUGGU |
| | NO: 15 | | NO: 957 | |
| MA0016 | SEQ ID | GAGGCUGCUGACCCUCCUGGG | SEQ ID | CAGGAGGGUCAGCAGCCUCAU |
| | NO: 16 | | NO: 958 | |
| MA0017 | SEQ ID | GGCUGCUGACCCUCCUGGGCC | SEQ ID | CCCAGGAGGGUCAGCAGCCUC |
| | NO: 17 | | NO: 959 | |
| MA0018 | SEQ ID | GCUGCUGACCCUCCUGGGCCU | SEQ ID | GCCCAGGAGGGUCAGCAGCCU |
| | NO: 18 | | NO: 960 | |
| MA0019 | SEQ ID | CUGCUGACCCUCCUGGGCCUU | SEQ ID | GGCCCAGGAGGGUCAGCAGCC |
| | NO: 19 | | NO: 961 | |
| MA0020 | SEQ ID | UGCUGACCCUCCUGGGCCUUC | SEQ ID | AGGCCCAGGAGGGUCAGCAGC |
| | NO: 20 | | NO: 962 | |
| MA0021 | SEQ ID | CUGACCCUCCUGGGCCUUCUG | SEQ ID | GAAGGCCCAGGAGGGUCAGCA |
| | NO: 21 | | NO: 963 | |
| MA0022 | SEQ ID | UGACCCUCCUGGGCCUUCUGU | SEQ ID | AGAAGGCCCAGGAGGGUCAGC |
| | NO: 22 | | NO: 964 | |
| MA0023 | SEQ ID | CCCUCCUGGGCCUUCUGUGUG | SEQ ID | CACAGAAGGCCCAGGAGGGUC |
| | NO: 23 | | NO: 965 | |
| MA0024 | SEQ ID | CCUCCUGGGCCUUCUGUGUGG | SEQ ID | ACACAGAAGGCCCAGGAGGGU |
| | NO: 24 | | NO: 966 | |
| MA0025 | SEQ ID | CUGGGCCUUCUGUGUGGCUCG | SEQ ID | AGCCACACAGAAGGCCCAGGA |
| | NO: 25 | | NO: 967 | |
| MA0026 | SEQ ID | GGGCCUUCUGUGUGGCUCGGU | SEQ ID | CGAGCCACACAGAAGGCCCAG |
| | NO: 26 | | NO: 968 | |
| MA0027 | SEQ ID | GGCCUUCUGUGUGGCUCGGUG | SEQ ID | CCGAGCCACACAGAAGGCCCA |
| | NO: 27 | | NO: 969 | |
| MA0028 | SEQ ID | CCUUCUGUGUGGCUCGGUGGC | SEQ ID | CACCGAGCCACACAGAAGGCC |
| | NO: 28 | | NO: 970 | |
| MA0029 | SEQ ID | CUUCUGUGUGGCUCGGUGGCC | SEQ ID | CCACCGAGCCACACAGAAGGC |
| | NO: 29 | | NO: 971 | |
| MA0030 | SEQ ID | CUGUGUGGCUCGGUGGCCACC | SEQ ID | UGGCCACCGAGCCACACAGAA |
| | NO: 30 | | NO: 972 | |
| MA0031 | SEQ ID | GUGUGGCUCGGUGGCCACCCC | SEQ ID | GGUGGCCACCGAGCCACACAG |
| | NO: 31 | | NO: 973 | |
| MA0032 | SEQ ID | GCUCGGUGGCCACCCCCUUGG | SEQ ID | AAGGGGGUGGCCACCGAGCCA |
| | NO: 32 | | NO: 974 | |
| MA0033 | SEQ ID | CUCGGUGGCCACCCCCUUGGG | SEQ ID | CAAGGGGGUGGCCACCGAGCC |
| | NO: 33 | | NO: 975 | |
| MA0034 | SEQ ID | CCACCCCCUUGGGCCCGAAGU | SEQ ID | UUCGGGCCCAAGGGGGUGGCC |
| | NO: 34 | | NO: 976 | |
| MA0035 | SEQ ID | CCCCCUUGGGCCCGAAGUGGC | SEQ ID | CACUUCGGGCCCAAGGGGGUG |
| | NO: 35 | | NO: 977 | |
| MA0036 | SEQ ID | GGCCCGAAGUGGCCUGAACCU | SEQ ID | GUUCAGGCCACUUCGGGCCCA |
| | NO: 36 | | NO: 978 | |
| MA0037 | SEQ ID | GCCCGAAGUGGCCUGAACCUG | SEQ ID | GGUUCAGGCCACUUCGGGCCC |
| | NO: 37 | | NO: 979 | |
| MA0038 | SEQ ID | CCCGAAGUGGCCUGAACCUGU | SEQ ID | AGGUUCAGGCCACUUCGGGCC |
| | NO: 38 | | NO: 980 | |
| MA0039 | SEQ ID | CCGAAGUGGCCUGAACCUGUG | SEQ ID | CAGGUUCAGGCCACUUCGGGC |
| | NO: 39 | | NO: 981 | |
| MA0040 | SEQ ID | CGAAGUGGCCUGAACCUGUGU | SEQ ID | ACAGGUUCAGGCCACUUCGGG |
| | NO: 40 | | NO: 982 | |
| MA0041 | SEQ ID | AAGUGGCCUGAACCUGUGUUC | SEQ ID | ACACAGGUUCAGGCCACUUCG |
| | NO: 41 | | NO: 983 | |
| MA0042 | SEQ ID | AGUGGCCUGAACCUGUGUUCG | SEQ ID | AACACAGGUUCAGGCCACUUC |
| | NO: 42 | | NO: 984 | |
| MA0043 | SEQ ID | GUGGCCUGAACCUGUGUUCGG | SEQ ID | GAACACAGGUUCAGGCCACUU |
| | NO: 43 | | NO: 985 | |
| MA0044 | SEQ ID | UGGCCUGAACCUGUGUUCGGG | SEQ ID | CGAACACAGGUUCAGGCCACU |
| | NO: 44 | | NO: 986 | |

| double | | | | |
|---|---|---|---|---|
| stranded | | | relative | |
| nucleic acid | SEQ ID | target MASP2 | expression | |
| number | NO: | mRNA sequence | level | note |
| MA0001 | SEQ ID | CAGGCCAGGCCAGCUGGAC | 0.5565 | * |
| | NO: 1885 | | | |
| MA0002 | SEQ ID | GCCAGGCCAGCUGGACGGG | 0.5660 | * |
| | NO: 1886 | | | |
| MA0003 | SEQ ID | CAGGCCAGCUGGACGGGCA | 0.2343 | |
| | NO: 1887 | | | |
| MA0004 | SEQ ID | AGGCCAGCDGGACGGGCAC | 0.5005 | * |
| | NO: 1888 | | | |
| MA0005 | SEQ ID | GGCCAGCUGGACGGGCACA | 0.5564 | * |
| | NO: 1889 | | | |
| MA0006 | SEQ ID | CAGCUGGACGGGCACACCA | 0.5744 | * |
| | NO: 1890 | | | |
| MA0007 | SEQ ID | AGCUGGACGGGCACACCAU | 0.2778 | |
| | NO: 1891 | | | |
| MA0008 | SEQ ID | CUGGACGGGCACACCAUGA | 0.4999 | * |
| | NO: 1892 | | | |
| MA0009 | SEQ ID | GGACGGGCACACCAUGAGG | 0.4423 | |
| | NO: 1893 | | | |
| MA0010 | SEQ ID | ACGGGCACACCAUGAGGCU | 0.5181 | * |
| | NO: 1894 | | | |
| MA0011 | SEQ ID | CGGGCACACCAUGAGGCUG | 0.4459 | |
| | NO: 1895 | | | |
| MA0012 | SEQ ID | GGGCACACCAUGAGGCUGC | 0.4654 | |
| | NO: 1896 | | | |
| MA0013 | SEQ ID | GGCACACCAUGAGGCUGCU | 0.5938 | |
| | NO: 1897 | | | |
| MA0014 | SEQ ID | CCAUGAGGCUGCUGACCCU | 0.5938 | |
| | NO: 1898 | | | |
| MA0015 | SEQ ID | CAUGAGGCUGCUGACCCUC | 0.5229 | * |
| | NO: 1899 | | | |
| MA0016 | SEQ ID | GAGGCUGCUGACCCUCCUG | 0.4945 | |
| | NO: 1900 | | | |
| MA0017 | SEQ ID | GGCUGCUGACCCUCCUGGG | 0.3354 | |
| | NO: 1901 | | | |
| MA0018 | SEQ ID | GCUGCUGACCCUCCUGGGC | 0.4020 | |
| | NO: 1902 | | | |
| MA0019 | SEQ ID | CUGCUGACCCUCCUGGGCC | 0.5934 | * |
| | NO: 1903 | | | |
| MA0020 | SEQ ID | UGCUGACCCUCCUGGGCCU | 0.1989 | |
| | NO: 1904 | | | |
| MA0021 | SEQ ID | CUGACCCUCCUGGGCCUUC | 0.3474 | |
| | NO: 1905 | | | |
| MA0022 | SEQ ID | UGACCCUCCUGGGCCUUCU | 0.2850 | |
| | NO: 1906 | | | |
| MA0023 | SEQ ID | CCCUCCUGGGCCUUCUGUG | 0.5761 | |
| | NO: 1907 | | | |
| MA0024 | SEQ ID | CCUCCUGGGCCUUCUGUGU | 0.5151 | * |
| | NO: 1908 | | | |
| MA0025 | SEQ ID | CUGGGCCUUCUGUGUGGCU | 0.5209 | * |
| | NO: 1909 | | | |
| MA0026 | SEQ ID | GGGCCUUCUGUGUGGCUCG | 0.3202 | |
| | NO: 1910 | | | |
| MA0027 | SEQ ID | GGCCUUCUGUGUGGCUCGG | 0.5230 | * |
| | NO: 1911 | | | |
| MA0028 | SEQ ID | CCUUCUGUGUGGCUCGGUG | 0.3391 | |
| | NO: 1912 | | | |
| MA0029 | SEQ ID | CUUCUGUGUGGCUCGGUGG | 0.5886 | * |
| | NO: 1913 | | | |
| MA0030 | SEQ ID | CUGUGUGGCUCGGUGGCCA | 0.3355 | |
| | NO: 1914 | | | |
| MA0031 | SEQ ID | GUGUGGCUCGGUGGCCACC | 0.5075 | * |
| | NO: 1915 | | | |
| MA0032 | SEQ ID | GCUCGGUGGCCACCCCCUU | 0.4531 | * |
| | NO: 1916 | | | |
| MA0033 | SEQ ID | CUCGGUGGCCACCCCCUUG | 0.5918 | |
| | NO: 1917 | | | |
| MA0034 | SEQ ID | CCACCCCCUUGGGCCCGAA | 0.5778 | * |
| | NO: 1918 | | | |
| MA0035 | SEQ ID | CCCCCUUGGGCCCGAAGUG | 0.3954 | |
| | NO: 1919 | | | |
| MA0036 | SEQ ID | GGCCCGAAGUGGCCUGAAC | 0.2172 | |
| | NO: 1920 | | | |
| MA0037 | SEQ ID | GCCCGAAGUGGCCUGAACC | 0.4503 | |
| | NO: 1921 | | | |
| MA0038 | SEQ ID | CCCGAAGUGGCCUGAACCU | 0.4177 | |
| | NO: 1922 | | | |
| MA0039 | SEQ ID | CCGAAGUGGCCUGAACCUG | 0.4746 | |
| | NO: 1923 | | | |
| MA0040 | SEQ ID | CGAAGUGGCCUGAACCUGU | 0.3387 | |
| | NO: 1924 | | | |
| MA0041 | SEQ ID | AAGUGGCCUGAACCUGUGU | 0.5072 | |
| | NO: 1925 | | | |
| MA0042 | SEQ ID | AGUGGCCUGAACCUGUGUU | 0.3258 | |
| | NO: 1926 | | | |
| MA0043 | SEQ ID | GUGGCCUGAACCUGUGUUC | 0.2609 | |
| | NO: 1927 | | | |
| MA0044 | SEQ ID | UGGCCUGAACCUGUGUUCG | 0.5049 | * |
| | NO: 1928 | | | |

TABLE 1-2

| double | | | | |
|---|---|---|---|---|
| stranded | | | | antisense strand |
| nucleic acid | SEQ ID | sense strand sequence | SEQ ID | sequence |
| number | NO: | (5′--->3′) | NO: | (5′--->3′) |
| MA0045 | SEQ ID | GGCCUGAACCUGUGUUCGGGC | SEQ ID | CCGAACACAGGUUCAGGCCAC |
| | NO: 45 | | NO: 987 | |
| MA0045 | SEQ ID | GGCCUGAACCUGUGUUCGGGC | SEQ ID | CCGAACACAGGUUCAGGCCAC |
| | NO: 45 | | NO: 987 | |
| MA0046 | SEQ ID | GCCUGAACCUGUGUUCGGGCG | SEQ ID | CCCGAACACAGGUUCAGGCCA |
| | NO: 46 | | NO: 988 | |
| MA0047 | SEQ ID | CCUGAACCUGUGUUCGGGCGC | SEQ ID | GCCCGAACACAGGUUCAGGCC |
| | NO: 47 | | NO: 989 | |
| MA0048 | SEQ ID | GAACCUGUGUUCGGGCGCCUG | SEQ ID | GGCGCCCGAACACAGGUUCAG |
| | NO: 48 | | NO: 990 | |
| MA0049 | SEQ ID | ACCUGUGUUCGGGCGCCUGGC | SEQ ID | CAGGCGCCCGAACACAGGUUC |
| | NO: 49 | | NO: 991 | |
| MA0050 | SEQ ID | GUGUUCGGGCGCCUGGCAUCC | SEQ ID | AUGCCAGGCGCCCGAACACAG |
| | NO: 50 | | NO: 992 | |
| MA0051 | SEQ ID | CCUGGCAUCCCCCGGCUUUCC | SEQ ID | AAAGCCGGGGGAUGCCAGGCG |
| | NO: 51 | | NO: 993 | |
| MA0052 | SEQ ID | CUGGCAUCCCCCGGCUUUCCA | SEQ ID | GAAAGCCGGGGGAUGCCAGGC |
| | NO: 52 | | NO: 994 | |
| MA0053 | SEQ ID | CCGGCUUUCCAGGGGAGUAUG | SEQ ID | UACUCCCCUGGAAAGCCGGGG |
| | NO: 53 | | NO: 995 | |
| MA0054 | SEQ ID | CGGCUUUCCAGGGGAGUAUGC | SEQ ID | AUACUCCCCUGGAAAGCCGGG |
| | NO: 54 | | NO: 996 | |
| MA0055 | SEQ ID | GGCUUUCCAGGGGAGUAUGCC | SEQ ID | CAUACUCCCCUGGAAAGCCGG |
| | NO: 55 | | NO: 997 | |
| MA0056 | SEQ ID | UUUCCAGGGGAGUAUGCCAAU | SEQ ID | UGGCAUACUCCCCUGGAAAGC |
| | NO: 56 | | NO: 998 | |
| MA0057 | SEQ ID | CAGGGGAGUAUGCCAAUGACC | SEQ ID | UCAUUGGCAUACUCCCCUGGA |
| | NO: 57 | | NO: 999 | |
| MA0058 | SEQ ID | AGGGGAGUAUGCCAAUGACCA | SEQ ID | GUCAUUGGCAUACUCCCCUGG |
| | NO: 58 | | NO: | |
| | | | 1000 | |
| MA0059 | SEQ ID | GGGGAGUAUGCCAAUGACCAG | SEQ ID | GGUCAUUGGCAUACUCCCCUG |
| | NO: 59 | | NO: | |
| | | | 1001 | |
| MA0060 | SEQ ID | GGGAGUAUGCCAAUGACCAGG | SEQ ID | UGGUCAUUGGCAUACUCCCCU |
| | NO: 60 | | NO: | |
| | | | 1002 | |
| MA0061 | SEQ ID | GGAGUAUGCCAAUGACCAGGA | SEQ ID | CUGGUCAUUGGCAUACUCCCC |
| | NO: 61 | | NO: | |
| | | | 1003 | |
| MA0062 | SEQ ID | GAGUAUGCCAAUGACCAGGAG | SEQ ID | CCUGGUCAUUGGCAUACUCCC |
| | NO: 62 | | NO: | |
| | | | 1004 | |
| MA0063 | SEQ ID | GCCAAUGACCAGGAGCGGCGC | SEQ ID | GCCGCUCCUGGUCAUUGGCAU |
| | NO: 63 | | NO: | |
| | | | 1005 | |
| MA0064 | SEQ ID | CCAAUGACCAGGAGCGGCGCU | SEQ ID | CGCCGCUCCUGGUCAUUGGCA |
| | NO: 64 | | NO: | |
| | | | 1006 | |
| MA0065 | SEQ ID | CAAUGACCAGGAGCGGCGCUG | SEQ ID | GCGCCGCUCCUGGUCAUUGGC |
| | NO: 65 | | NO: | |
| | | | 1007 | |
| MA0066 | SEQ ID | AUGACCAGGAGCGGCGCUGGA | SEQ ID | CAGCGCCGCUCCUGGUCAUUG |
| | NO: 66 | | NO: | |
| | | | 1008 | |
| MA0067 | SEQ ID | ACCAGGAGCGGCGCUGGACCC | SEQ ID | GUCCAGCGCCGCUCCUGGUCA |
| | NO: 67 | | NO: | |
| | | | 1009 | |
| MA0068 | SEQ ID | GGAGCGGCGCUGGACCCUGAC | SEQ ID | CAGGGUCCAGCGCCGCUCCUG |
| | NO: 68 | | NO: | |
| | | | 1010 | |
| MA0069 | SEQ ID | GAGCGGCGCUGGACCCUGACU | SEQ ID | UCAGGGUCCAGCGCCGCUCCU |
| | NO: 69 | | NO: | |
| | | | 1011 | |
| MA0070 | SEQ ID | AGCGGCGCUGGACCCUGACUG | SEQ ID | GUCAGGGUCCAGCGCCGCUCC |
| | NO: 70 | | NO: | |
| | | | 1012 | |
| MA0071 | SEQ ID | GCGGCGCUGGACCCUGACUGC | SEQ ID | AGUCAGGGUCCAGCGCCGCUC |
| | NO: 71 | | NO: | |
| | | | 1013 | |
| MA0072 | SEQ ID | CGGCGCUGGACCCUGACUGCA | SEQ ID | CAGUCAGGGUCCAGCGCCGCU |
| | NO: 72 | | NO: | |
| | | | 1014 | |
| MA0073 | SEQ ID | GGCGCUGGACCCUGACUGCAC | SEQ ID | GCAGUCAGGGUCCAGCGCCGC |
| | NO: 73 | | NO: | |
| | | | 1015 | |
| MA0074 | SEQ ID | GCGCUGGACCCUGACUGCACC | SEQ ID | UGCAGUCAGGGUCCAGCGCCG |
| | NO: 74 | | NO: | |
| | | | 1016 | |
| MA0075 | SEQ ID | CGCUGGACCCUGACUGCACCC | SEQ ID | GUGCAGUCAGGGUCCAGCGCC |
| | NO: 75 | | NO: | |
| | | | 1017 | |
| MA0076 | SEQ ID | GCUGGACCCUGACUGCACCCC | SEQ ID | GGUGCAGUCAGGGUCCAGCGC |
| | NO: 76 | | NO: | |
| | | | 1018 | |
| MA0077 | SEQ ID | GGACCCUGACUGCACCCCCCG | SEQ ID | GGGGGUGCAGUCAGGGUCCAG |
| | NO: 77 | | NO: | |
| | | | 1019 | |
| MA0078 | SEQ ID | GACCCUGACUGCACCCCCCGG | SEQ ID | GGGGGGUGCAGUCAGGGUCCA |
| | NO: 78 | | NO: | |
| | | | 1020 | |
| MA0079 | SEQ ID | GACUGCACCCCCCGGCUACCG | SEQ ID | GUAGCCGGGGGGUGCAGUCAG |
| | NO: 79 | | NO: | |
| | | | 1021 | |
| MA0080 | SEQ ID | CCGGCUACCGCCUGCGCCUCU | SEQ ID | AGGCGCAGGCGGUAGCCGGGG |
| | NO: 80 | | NO: | |
| | | | 1022 | |
| MA0081 | SEQ ID | GGCUACCGCCUGCGCCUCUAC | SEQ ID | AGAGGCGCAGGCGGUAGCCGG |
| | NO: 81 | | NO: | |
| | | | 1023 | |
| MA0082 | SEQ ID | GCUACCGCCUGCGCCUCUACU | SEQ ID | UAGAGGCGCAGGCGGUAGCCG |
| | NO: 82 | | NO: | |
| | | | 1024 | |
| MA0083 | SEQ ID | CUACCGCCUGCGCCUCUACUU | SEQ ID | GUAGAGGCGCAGGCGGUAGCC |
| | NO: 83 | | NO: | |
| | | | 1025 | |
| MA0084 | SEQ ID | ACCGCCUGCGCCUCUACUUCA | SEQ ID | AAGUAGAGGCGCAGGCGGUAG |
| | NO: 84 | | NO: | |
| | | | 1026 | |
| MA0085 | SEQ ID | CCGCCUGCGCCUCUACUUCAC | SEQ ID | GAAGUAGAGGCGCAGGCGGUA |
| | NO: 85 | | NO: | |
| | | | 1027 | |
| MA0086 | SEQ ID | CGCCUGCGCCUCUACUUCACC | SEQ ID | UGAAGUAGAGGCGCAGGCGGU |
| | NO: 86 | | NO: | |
| | | | 1028 | |
| MA0087 | SEQ ID | GCCUGCGCCUCUACUUCACCC | SEQ ID | GUGAAGUAGAGGCGCAGGCGG |
| | NO: 87 | | NO: | |
| | | | 1029 | |
| MA0088 | SEQ ID | CCUGCGCCUCUACUUCACCCA | SEQ ID | GGUGAAGUAGAGGCGCAGGCG |
| | NO: 88 | | NO: | |
| | | | 1030 | |

| double | | | | |
|---|---|---|---|---|
| stranded | | | relative | |
| nucleic acid | SEQ ID | target MASP2 | expression | |
| number | NO: | mRNA sequence | level | note |
| MA0045 | SEQ ID | GGCCUGAACCUGUGUUCGG | 0.3877 | |
| | NO: 1929 | | | |
| MA0045 | SEQ ID | GGCCUGAACCUGUGUUCGG | 0.3877 | |
| | NO: 1929 | | | |
| MA0046 | SEQ ID | GCCUGAACCUGUGUUCGGG | 0.3492 | |
| | NO: 1930 | | | |
| MA0047 | SEQ ID | CCUGAACCUGUGUUCGGGC | 0.5680 | * |
| | NO: 1931 | | | |
| MA0048 | SEQ ID | GAACCUGUGUUCGGGCGCC | 0.3936 | |
| | NO: 1932 | | | |
| MA0049 | SEQ ID | ACCUGUGUUCGGGCGCCUG | 0.4534 | |
| | NO: 1933 | | | |
| MA0050 | SEQ ID | GUGUUCGGGCGCCUGGCAU | 0.5830 | * |
| | NO: 1934 | | | |
| MA0051 | SEQ ID | CCUGGCAUCCCCCGGCUUU | 0.4024 | |
| | NO: 1935 | | | |
| MA0052 | SEQ ID | CUGGCAUCCCCCGGCUUUC | 0.4241 | |
| | NO: 1936 | | | |
| MA0053 | SEQ ID | CCGGCUUUCCAGGGGAGUA | 0.2817 | |
| | NO: 1937 | | | |
| MA0054 | SEQ ID | CGGCUUUCCAGGGGAGUAU | 0.3568 | |
| | NO: 1938 | | | |
| MA0055 | SEQ ID | GGCUUUCCAGGGGAGUAUG | 0.4706 | |
| | NO: 1939 | | | |
| MA0056 | SEQ ID | UUUCGAGGGGAGUAUGCCA | 0.5581 | |
| | NO: 1940 | | | |
| MA0057 | SEQ ID | CAGGGGAGUAUGCCAAUGA | 0.4027 | |
| | NO: 1941 | | | |
| MA0058 | SEQ ID | AGGGGAGUAUGCCAAUGAC | 0.5934 | * |
| | NO: 1942 | | | |
| MA0059 | SEQ ID | GGGGAGUAUGCCAAUGACC | 0.5499 | |
| | NO: 1943 | | | |
| MA0060 | SEQ ID | GGGAGUAUGCCAAUGACCA | 0.4827 | |
| | NO: 1944 | | | |
| MA0061 | SEQ ID | GGAGUAUGCCAAUGACCAG | 0.5511 | * |
| | NO: 1945 | | | |
| MA0062 | SEQ ID | GAGUAUGCCAAUGACCAGG | 0.4938 | |
| | NO: 1946 | | | |
| MA0063 | SEQ ID | GCCAAUGACCAGGAGCGGC | 0.5419 | |
| | NO: 1947 | | | |
| MA0064 | SEQ ID | CCAAUGACCAGGAGCGGCG | 0.4878 | |
| | NO: 1948 | | | |
| MA0065 | SEQ ID | CAAUGACCAGGAGCGGCGC | 0.5854 | * |
| | NO: 1949 | | | |
| MA0066 | SEQ ID | AUGACCAGGAGCGGCGCUG | 0.5111 | * |
| | NO: 1950 | | | |
| MA0067 | SEQ ID | ACCAGGAGCGGCGCUGGAC | 0.5592 | * |
| | NO: 1951 | | | |
| MA0068 | SEQ ID | GGAGCGGCGCUGGACCCUG | 0.5431 | * |
| | NO: 1952 | | | |
| MA0069 | SEQ ID | GAGCGGCGCUGGACCCUGA | 0.3272 | |
| | NO: 1953 | | | |
| MA0070 | SEQ ID | AGCGGCGCUGGACCCUGAC | 0.4880 | * |
| | NO: 1954 | | | |
| MA0071 | SEQ ID | GCGGCGCUGGACCCUGACU | 0.3677 | |
| | NO: 1955 | | | |
| MA0072 | SEQ ID | CGGCGCUGGACCCUGACUG | 0.4002 | |
| | NO: 1956 | | | |
| MA0073 | SEQ ID | GGCGCUGGACCCUGACUGC | 0.5808 | |
| | NO: 1957 | | | |
| MA0074 | SEQ ID | GCGCUGGACCCUGACUGCA | 0.2831 | |
| | NO: 1958 | | | |
| MA0075 | SEQ ID | CGCUGGACCCUGACUGCAC | 0.4658 | * |
| | NO: 1959 | | | |
| MA0076 | SEQ ID | GCUGGACCCUGACUGCACC | 0.3838 | |
| | NO: 1960 | | | |
| MA0077 | SEQ ID | GGACCCUGACUGCACCCCC | 0.4356 | |
| | NO: 1961 | | | |
| MA0078 | SEQ ID | GACCCUGACUGCACCCCCC | 0.3597 | |
| | NO: 1962 | | | |
| MA0079 | SEQ ID | GACUGCACCCCCCGGCUAC | 0.5523 | |
| | NO: 1963 | | | |
| MA0080 | SEQ ID | CCGGCUACCGCCUGCGCCU | 0.5702 | * |
| | NO: 1964 | | | |
| MA0081 | SEQ ID | GGCUACCGCCUGCGCCUCU | 0.4539 | |
| | NO: 1965 | | | |
| MA0082 | SEQ ID | GCUACCGCCUGCGCCUCUA | 0.1727 | |
| | NO: 1966 | | | |
| MA0083 | SEQ ID | CUACCGCCUGCGCCUCUAC | 0.5262 | * |
| | NO: 1967 | | | |
| MA0084 | SEQ ID | ACCGCCUGCGCCUCUACUU | 0.3332 | |
| | NO: 1968 | | | |
| MA0085 | SEQ ID | CCGCCUGCGCCUCUACUUC | 0.4093 | |
| | NO: 1969 | | | |
| MA0086 | SEQ ID | CGCCUGCGCCUCUACUUCA | 0.2987 | |
| | NO: 1970 | | | |
| MA0087 | SEQ ID | GCCUGCGCCUCUACUUCAC | 0.2198 | |
| | NO: 1971 | | | |
| MA0088 | SEQ ID | CCUGCGCCUCUACUUCACC | 0.4851 | |
| | NO: 1972 | | | |

TABLE 1-3

| double stranded | | | | antisense strand | | | | |
|---|---|---|---|---|---|---|---|---|
| nucleic acid | | sense strand sequence | | sequence | | target MASP2 | relative expression | |
| number | SEQ ID NO: | (5′--->3′) | SEQ ID NO: | (5′--->3′) | SEQ ID NO: | mRNA sequence | level | note |
| MA0089 | SEQ ID | CUGCGCCUCUACUUCACCCAC | SEQ ID | GGGUGAAGUAGAGGCGCAGGC | SEQ ID | CUGCGCCUCUACUUCACCC | 0.4230 | |
| | NO: 89 | | NO: | | NO: 1973 | | | |
| | | | 1031 | | | | | |
| MA0090 | SEQ ID | UGCGCCUCUACUUCACCCACU | SEQ ID | UGGGUGAAGUAGAGGCGCAGG | SEQ ID | UGCGCCUCUACUUCACCCA | 0.4596 | |
| | NO: 90 | | NO: | | NO: 1974 | | | |
| | | | 1032 | | | | | |
| MA0091 | SEQ ID | CGCCUCUACUUCACCCACUUC | SEQ ID | AGUGGGUGAAGUAGAGGCGCA | SEQ ID | CGCCUCUACUUCACCCACU | 0.3119 | |
| | NO: 91 | | NO: | | NO: 1975 | | | |
| | | | 1033 | | | | | |
| MA0092 | SEQ ID | GCCUCUACUUCACCCACUUCG | SEQ ID | AAGUGGGUGAAGUAGAGGCGC | SEQ ID | GCCUCUACUUCACCCACUU | 0.4140 | |
| | NO: 92 | | NO: | | NO: 1976 | | | |
| | | | 1034 | | | | | |
| MA0093 | SEQ ID | CCUCUACUUCACCCACUUCGA | SEQ ID | GAAGUGGGUGAAGUAGAGGCG | SEQ ID | CCUCUACUUCACCCACUUC | 0.4361 | |
| | NO: 93 | | NO: | | NO: 1977 | | | |
| | | | 1035 | | | | | |
| MA0094 | SEQ ID | CUCUACUUCACCCACUUCGAC | SEQ ID | CGAAGUGGGUGAAGUAGAGGC | SEQ ID | CUCUACUUCACCCACUUCG | 0.5968 | * |
| | NO: 94 | | NO: | | NO: 1978 | | | |
| | | | 1036 | | | | | |
| MA0095 | SEQ ID | UCUACUUCACCCACUUCGACC | SEQ ID | UCGAAGUGGGUGAAGUAGAGG | SEQ ID | UCUACUUCACCCACUUCGA | 0.2870 | |
| | NO: 95 | | NO: | | NO: 1979 | | | |
| | | | 1037 | | | | | |
| MA0096 | SEQ ID | CUACUUCACCCACUUCGACCU | SEQ ID | GUCGAAGUGGGUGAAGUAGAG | SEQ ID | CUACUUCACCCACUUCGAC | 0.3223 | |
| | NO: 96 | | NO: | | NO: 1980 | | | |
| | | | 1038 | | | | | |
| MA0097 | SEQ ID | ACUUCACCCACUUCGACCUGG | SEQ ID | AGGUCGAAGUGGGUGAAGUAG | SEQ ID | ACUUCACCCACUUCGACCU | 0.3548 | |
| | NO: 97 | | NO: | | NO: 1981 | | | |
| | | | 1039 | | | | | |
| MA0098 | SEQ ID | CUUCACCCACUUCGACCUGGA | SEQ ID | CAGGUCGAAGUGGGUGAAGUA | SEQ ID | CUUCACCCACUUCGACCUG | 0.5948 | * |
| | NO: 98 | | NO: | | NO: 1982 | | | |
| | | | 1040 | | | | | |
| MA0099 | SEQ ID | UCACCCACUUCGACCUGGAGC | SEQ ID | UCCAGGUCGAAGUGGGUGAAG | SEQ ID | UCACCCACUUCGACCUGGA | 0.2592 | |
| | NO: 99 | | NO: | | NO: 1983 | | | |
| | | | 1041 | | | | | |
| MA0100 | SEQ ID | CCCACUUCGACCUGGAGCUCU | SEQ ID | AGCUCCAGGUCGAAGUGGGUG | SEQ ID | CCCACUUCGACCUGGAGCU | 0.3671 | |
| | NO: 100 | | NO: | | NO: 1984 | | | |
| | | | 1042 | | | | | |
| MA0101 | SEQ ID | CACUUCGACCUGGAGCUCUCC | SEQ ID | AGAGCUCCAGGUCGAAGUGGG | SEQ ID | CACUUCGACCUGGAGCUCU | 0.3351 | |
| | NO: 101 | | NO: | | NO: 1985 | | | |
| | | | 1043 | | | | | |
| MA0102 | SEQ ID | CGACCUGGAGCUCUCCCACCU | SEQ ID | GUGGGAGAGCUCCAGGUCGAA | SEQ ID | CGACCUGGAGCUCUCCCAC | 0.5289 | |
| | NO: 102 | | NO: | | NO: 1986 | | | |
| | | | 1044 | | | | | |
| MA0103 | SEQ ID | CCUGGAGCUCUCCCACCUCUG | SEQ ID | GAGGUGGGAGAGCUCCAGGUC | SEQ ID | CCUGGAGCUCUCCCACCUC | 0.2921 | |
| | NO: 103 | | NO: | | NO: 1987 | | | |
| | | | 1045 | | | | | |
| MA0104 | SEQ ID | GGAGCUCUCCCACCUCUGCGA | SEQ ID | GCAGAGGUGGGAGAGCUCCAG | SEQ ID | GGAGCUCUCCCACCUCUGC | 0.3509 | |
| | NO: 104 | | NO: | | NO: 1988 | | | |
| | | | 1046 | | | | | |
| MA0105 | SEQ ID | GAGCUCUCCCACCUCUGCGAG | SEQ ID | CGCAGAGGUGGGAGAGCUCCA | SEQ ID | GAGCUCUCCCACCUCUGCG | 0.5587 | * |
| | NO: 105 | | NO: | | NO: 1989 | | | |
| | | | 1047 | | | | | |
| MA0106 | SEQ ID | AGCUCUCCCACCUCUGCGAGU | SEQ ID | UCGCAGAGGUGGGAGAGCUCC | SEQ ID | AGCUCUCCCACCUCUGCGA | 0.4287 | |
| | NO: 106 | | NO: | | NO: 1990 | | | |
| | | | 1048 | | | | | |
| MA0107 | SEQ ID | UCUCCCACCUCUGCGAGUACG | SEQ ID | UACUCGCAGAGGUGGGAGAGC | SEQ ID | UCUCCCACCUCUGCGAGUA | 0.4939 | * |
| | NO: 107 | | NO: | | NO: 1991 | | | |
| | | | 1049 | | | | | |
| MA0108 | SEQ ID | CUCCCACCUCUGCGAGUACGA | SEQ ID | GUACUCGCAGAGGUGGGAGAG | SEQ ID | CUCCCACCUCUGCGAGUAC | 0.4280 | |
| | NO: 108 | | NO: | | NO: 1992 | | | |
| | | | 1050 | | | | | |
| MA0109 | SEQ ID | CCCACCUCUGCGAGUACGACU | SEQ ID | UCGUACUCGCAGAGGUGGGAG | SEQ ID | CCCACCUCUGCGAGUACGA | 0.2889 | |
| | NO: 109 | | NO: | | NO: 1993 | | | |
| | | | 1051 | | | | | |
| MA0110 | SEQ ID | CCACCUCUGCGAGUACGACUU | SEQ ID | GUCGUACUCGCAGAGGUGGGA | SEQ ID | CCACCUCUGCGAGUACGAC | 0.3150 | |
| | NO: 110 | | NO: | | NO: 1994 | | | |
| | | | 1052 | | | | | |
| MA0111 | SEQ ID | ACCUCUGCGAGUACGACUUCG | SEQ ID | AAGUCGUACUCGCAGAGGUGG | SEQ ID | ACCUCUGCGAGUACGACUU | 0.2940 | |
| | NO: 111 | | NO: | | NO: 1995 | | | |
| | | | 1053 | | | | | |
| MA0112 | SEQ ID | CCUCUGCGAGUACGACUUCGU | SEQ ID | GAAGUCGUACUCGCAGAGGUG | SEQ ID | CCUCUGCGAGUACGACUUC | 0.4900 | * |
| | NO: 112 | | NO: | | NO: 1996 | | | |
| | | | 1054 | | | | | |
| MA0113 | SEQ ID | UCUGCGAGUACGACUUCGUCA | SEQ ID | ACGAAGUCGUACUCGCAGAGG | SEQ ID | UCUGCGAGUACGACUUCGU | 0.4205 | |
| | NO: 113 | | NO: | | NO: 1997 | | | |
| | | | 1055 | | | | | |
| MA0114 | SEQ ID | CUGCGAGUACGACUUCGUCAA | SEQ ID | GACGAAGUCGUACUCGCAGAG | SEQ ID | CUGCGAGUACGACUUCGUC | 0.5010 | |
| | NO: 114 | | NO: | | NO: 1998 | | | |
| | | | 1056 | | | | | |
| MA0115 | SEQ ID | GCGAGUACGACUUCGUCAAGC | SEQ ID | UUGACGAAGUCGUACUCGCAG | SEQ ID | GCGAGUACGACUUCGUCAA | 0.4090 | |
| | NO: 115 | | NO: | | NO: 1999 | | | |
| | | | 1057 | | | | | |
| MA0116 | SEQ ID | CGAGUACGACUUCGUCAAGCU | SEQ ID | CUUGACGAAGUCGUACUCGCA | SEQ ID | CGAGUACGACUUCGUCAAG | 0.5685 | |
| | NO: 116 | | NO: | | NO: 2000 | | | |
| | | | 1058 | | | | | |
| MA0117 | SEQ ID | GAGUACGACUUCGUCAAGCUG | SEQ ID | GCUUGACGAAGUCGUACUCGC | SEQ ID | GAGUACGACUUCGUCAAGC | 0.3707 | |
| | NO: 117 | | NO: | | NO: 2001 | | | |
| | | | 1059 | | | | | |
| MA0118 | SEQ ID | AGUACGACUUCGUCAAGCUGA | SEQ ID | AGCUUGACGAAGUCGUACUCG | SEQ ID | AGUACGACUUCGUCAAGCU | 0.2847 | |
| | NO: 118 | | NO: | | NO: 2002 | | | |
| | | | 1060 | | | | | |
| MA0119 | SEQ ID | GUACGACUUCGUCAAGCUGAG | SEQ ID | CAGCUUGACGAAGUCGUACUC | SEQ ID | GUACGACUUCGUCAAGCUG | 0.4394 | * |
| | NO: 119 | | NO: | | NO: 2003 | | | |
| | | | 1061 | | | | | |
| MA0120 | SEQ ID | ACGACUUCGUCAAGCUGAGCU | SEQ ID | CUCAGCUUGACGAAGUCGUAC | SEQ ID | ACGACUUCGUCAAGCUGAG | 0.3891 | |
| | NO: 120 | | NO: | | NO: 2004 | | | |
| | | | 1062 | | | | | |
| MA0121 | SEQ ID | CGACUUCGUCAAGCUGAGCUC | SEQ ID | GCUCAGCUUGACGAAGUCGUA | SEQ ID | CGACUUCGUCAAGCUGAGC | 0.5477 | |
| | NO: 121 | | NO: | | NO: 2005 | | | |
| | | | 1063 | | | | | |
| MA0122 | SEQ ID | GACUUCGUCAAGCUGAGCUCG | SEQ ID | AGCUCAGCUUGACGAAGUCGU | SEQ ID | GACUUCGUCAAGCUGAGCU | 0.5264 | * |
| | NO: 122 | | NO: | | NO: 2006 | | | |
| | | | 1064 | | | | | |
| MA0123 | SEQ ID | CGUCAAGCUGAGCUCGGGGGC | SEQ ID | CCCCGAGCUCAGCUUGACGAA | SEQ ID | CGUCAAGCUGAGCUCGGGG | 0.3898 | |
| | NO: 123 | | NO: | | NO: 2007 | | | |
| | | | 1065 | | | | | |
| MA0124 | SEQ ID | CCAAGGUGCUGGCCACGCUGU | SEQ ID | AGCGUGGCCAGCACCUUGGCC | SEQ ID | CCAAGGUGCUGGCCACGCU | 0.5599 | |
| | NO: 124 | | NO: | | NO: 2008 | | | |
| | | | 1066 | | | | | |
| MA0125 | SEQ ID | UGGCCACGCUGUGCGGGCAGG | SEQ ID | UGCCCGCACAGCGUGGCCAGC | SEQ ID | UGGCCACGCUGUGCGGGCA | 0.4506 | |
| | NO: 125 | | NO: | | NO: 2009 | | | |
| | | | 1067 | | | | | |
| MA0126 | SEQ ID | CCACGCUGUGCGGGCAGGAGA | SEQ ID | UCCUGCCCGCACAGCGUGGCC | SEQ ID | CCACGCUGUGCGGGCAGGA | 0.5102 | * |
| | NO: 126 | | NO: | | NO: 2010 | | | |
| | | | 1068 | | | | | |
| MA0127 | SEQ ID | GUGCGGGCAGGAGAGCACAGA | SEQ ID | UGUGCUCUCCUGCCCGCACAG | SEQ ID | GUGCGGGCAGGAGAGCACA | 0.3473 | |
| | NO: 127 | | NO: | | NO: 2011 | | | |
| | | | 1069 | | | | | |
| MA0128 | SEQ ID | GGCAGGAGAGCACAGACACGG | SEQ ID | GUGUCUGUGCUCUCCUGCCCG | SEQ ID | GGCAGGAGAGCACAGACAC | 0.3693 | |
| | NO: 128 | | NO: | | NO: 2012 | | | |
| | | | 1070 | | | | | |
| MA0129 | SEQ ID | GCAGGAGAGCACAGACACGGA | SEQ ID | CGUGUCUGUGCUCUCCUGCCC | SEQ ID | GCAGGAGAGCACAGACACG | 0.2405 | |
| | NO: 129 | | NO: | | NO: 2013 | | | |
| | | | 1071 | | | | | |
| MA0130 | SEQ ID | AGGAGAGCACAGACACGGAGC | SEQ ID | UCCGUGUCUGUGCUCUCCUGC | SEQ ID | AGGAGAGCACAGACACGGA | 0.2569 | |
| | NO: 130 | | NO: | | NO: 2014 | | | |
| | | | 1072 | | | | | |
| MA0131 | SEQ ID | GGAGAGCACAGACACGGAGCG | SEQ ID | CUCCGUGUCUGUGCUCUCCUG | SEQ ID | GGAGAGCACAGACACGGAG | 0.4257 | |
| | NO: 131 | | NO: | | NO: 2015 | | | |
| | | | 1073 | | | | | |
| MA0132 | SEQ ID | GAGAGCACAGACACGGAGCGG | SEQ ID | GCUCCGUGUCUGUGCUCUCCU | SEQ ID | GAGAGCACAGACACGGAGC | 0.4422 | |
| | NO: 132 | | NO: | | NO: 2016 | | | |
| | | | 1074 | | | | | |

TABLE 1-4

| double stranded | | | | antisense strand | | | | |
|---|---|---|---|---|---|---|---|---|
| nucleica cid | | sense strand sequence | | sequence | | target MASP2 | relative expression | |
| number | SEQ ID NO: | (5′--->3′) | SEQ ID NO: | (5′--->3′) | SEQ ID NO: | mRNA sequence | level | note |
| MA0133 | SEQ ID | AGAGCACAGACACGGAGCGGG | SEQ ID | CGCUCCGUGUCUGUGCUCUCC | SEQ ID | AGAGCACAGACACGGAGCG | 0.3852 | |
| | NO: 133 | | NO: | | NO: 2017 | | | |
| | | | 1075 | | | | | |
| MA0134 | SEQ ID | CGGGCCCCUGGCAAGGACACU | SEQ ID | UGUCCUUGCCAGGGGCCCGCU | SEQ ID | CGGGCCCCUGGCAAGGACA | 0.4629 | * |
| | NO: 134 | | NO: | | NO: 2018 | | | |
| | | | 1076 | | | | | |
| MA0135 | SEQ ID | GCCCCUGGCAAGGACACUUUC | SEQ ID | AAGUGUCCUUGCCAGGGGCCC | SEQ ID | GCCCCUGGCAAGGACACUU | 0.2544 | |
| | NO: 135 | | NO: | | NO: 2019 | | | |
| | | | 1077 | | | | | |
| MA0136 | SEQ ID | CUGGCAAGGACACUUUCUACU | SEQ ID | UAGAAAGUGUCCUUGCCAGGG | SEQ ID | CUGGCAAGGACACUUUCUA | 0.2309 | |
| | NO: 136 | | NO: | | NO: 2020 | | | |
| | | | 1078 | | | | | |
| MA0137 | SEQ ID | GGCAAGGACACUUUCUACUCG | SEQ ID | AGUAGAAAGUGUCCUUGCCAG | SEQ ID | GGCAAGGACACUUUCUACU | 0.4818 | * |
| | NO: 137 | | NO: | | NO: 2021 | | | |
| | | | 1079 | | | | | |
| MA0138 | SEQ ID | GCAAGGACACUUUCUACUCGC | SEQ ID | GAGUAGAAAGUGUCCUUGCCA | SEQ ID | GCAAGGACACUUUCUACUC | 0.2564 | |
| | NO: 138 | | NO: | | NO: 2022 | | | |
| | | | 1080 | | | | | |
| MA0139 | SEQ ID | AGGACACUUUCUACUCGCUGG | SEQ ID | AGCGAGUAGAAAGUGUCCUUG | SEQ ID | AGGACACUUUCUACUCGCU | 0.4851 | * |
| | NO: 139 | | NO: | | NO: 2023 | | | |
| | | | 1081 | | | | | |
| MA0140 | SEQ ID | GGACACUUUCUACUCGCUGGG | SEQ ID | CAGCGAGUAGAAAGUGUCCUU | SEQ ID | GGACACUUUCUACUCGCUG | 0.3642 | |
| | NO: 140 | | NO: | | NO: 2024 | | | |
| | | | 1082 | | | | | |
| MA0141 | SEQ ID | GACACUUUCUACUCGCUGGGC | SEQ ID | CCAGCGAGUAGAAAGUGUCCU | SEQ ID | GACACUUUCUACUCGCUGG | 0.2720 | |
| | NO: 141 | | NO: | | NO: 2025 | | | |
| | | | 1083 | | | | | |
| MA0142 | SEQ ID | ACACUUUCUACUCGCUGGGCU | SEQ ID | CCCAGCGAGUAGAAAGUGUCC | SEQ ID | ACACUUUCUACUCGCUGGG | 0.5051 | * |
| | NO: 142 | | NO: | | NO: 2026 | | | |
| | | | 1084 | | | | | |
| MA0143 | SEQ ID | ACUUUCUACUCGCUGGGCUCC | SEQ ID | AGCCCAGCGAGUAGAAAGUGU | SEQ ID | ACUUUCUACUCGCUGGGCU | 0.1889 | |
| | NO: 143 | | NO: | | NO: 2027 | | | |
| | | | 1085 | | | | | |
| MA0144 | SEQ ID | CUUUCUACUCGCUGGGCUCCA | SEQ ID | GAGCCCAGCGAGUAGAAAGUG | SEQ ID | CUUUCUACUCGCUGGGCUC | 0.4350 | |
| | NO: 144 | | NO: | | NO: 2028 | | | |
| | | | 1086 | | | | | |
| MA0145 | SEQ ID | CUCGCUGGGCUCCAGCCUGGA | SEQ ID | CAGGCUGGAGCCCAGCGAGUA | SEQ ID | CUCGCUGGGCUCCAGCCUG | 0.3224 | |
| | NO: 145 | | NO: | | NO: 2029 | | | |
| | | | 1087 | | | | | |
| MA0146 | SEQ ID | CGCUGGGCUCCAGCCUGGACA | SEQ ID | UCCAGGCUGGAGCCCAGCGAG | SEQ ID | CGCUGGGCUCCAGCCUGGA | 0.4621 | * |
| | NO: 146 | | NO: | | NO: 2030 | | | |
| | | | 1088 | | | | | |
| MA0147 | SEQ ID | CUGGGCUCCAGCCUGGACAUU | SEQ ID | UGUCCAGGCUGGAGCCCAGCG | SEQ ID | CUGGGCUCCAGCCUGGACA | 0.2722 | |
| | NO: 147 | | NO: | | NO: 2031 | | | |
| | | | 1089 | | | | | |
| MA0148 | SEQ ID | UGGGCUCCAGCCUGGACAUUA | SEQ ID | AUGUCCAGGCUGGAGCCCAGC | SEQ ID | UGGGCUCCAGCCUGGACAU | 0.3401 | |
| | NO: 148 | | NO: | | NO: 2032 | | | |
| | | | 1090 | | | | | |
| MA0149 | SEQ ID | GGGCUCCAGCCUGGACAUUAC | SEQ ID | AAUGUCCAGGCUGGAGCCCAG | SEQ ID | GGGCUCCAGCCUGGACAUU | 0.3403 | |
| | NO: 149 | | NO: | | NO: 2033 | | | |
| | | | 1091 | | | | | |
| MA0150 | SEQ ID | GGCUCCAGCCUGGACAUUACC | SEQ ID | UAAUGUCCAGGCUGGAGCCCA | SEQ ID | GGCUCCAGCCUGGACAUUA | 0.2812 | |
| | NO: 150 | | NO: | | NO: 2034 | | | |
| | | | 1092 | | | | | |
| MA0151 | SEQ ID | GCUCCAGCCUGGACAUUACCU | SEQ ID | GUAAUGUCCAGGCUGGAGCCC | SEQ ID | GCUCCAGCCUGGACAUUAC | 0.2949 | |
| | NO: 151 | | NO: | | NO: 2035 | | | |
| | | | 1093 | | | | | |
| MA0152 | SEQ ID | CUCCAGCCUGGACAUUACCUU | SEQ ID | GGUAAUGUCCAGGCUGGAGCC | SEQ ID | CUCCAGCCUGGACAUUACC | 0.3877 | |
| | NO: 152 | | NO: | | NO: 2036 | | | |
| | | | 1094 | | | | | |
| MA0153 | SEQ ID | CCAGCCUGGACAUUACCUUCC | SEQ ID | AAGGUAAUGUCCAGGCUGGAG | SEQ ID | CCAGCCUGGACAUUACCUU | 0.2816 | |
| | NO: 153 | | NO: | | NO: 2037 | | | |
| | | | 1095 | | | | | |
| MA0154 | SEQ ID | CAGCCUGGACAUUACCUUCCG | SEQ ID | GAAGGUAAUGUCCAGGCUGGA | SEQ ID | CAGCCUGGACAUUACCUUC | 0.4591 | |
| | NO: 154 | | NO: | | NO: 2038 | | | |
| | | | 1096 | | | | | |
| MA0155 | SEQ ID | GCCUGGACAUUACCUUCCGCU | SEQ ID | CGGAAGGUAAUGUCCAGGCUG | SEQ ID | GCCUGGACAUUACCUUCCG | 0.4473 | |
| | NO: 155 | | NO: | | NO: 2039 | | | |
| | | | 1097 | | | | | |
| MA0156 | SEQ ID | CCUGGACAUUACCUUCCGCUC | SEQ ID | GCGGAAGGUAAUGUCCAGGCU | SEQ ID | CCUGGACAUUACCUUCCGC | 0.4523 | * |
| | NO: 156 | | NO: | | NO: 2040 | | | |
| | | | 1098 | | | | | |
| MA0157 | SEQ ID | CUGGACAUUACCUUCCGCUCC | SEQ ID | AGCGGAAGGUAAUGUCCAGGC | SEQ ID | CUGGACAUUACCUUCCGCU | 0.4886 | |
| | NO: 157 | | NO: | | NO: 2041 | | | |
| | | | 1099 | | | | | |
| MA0158 | SEQ ID | GGACAUUACCUUCCGCUCCGA | SEQ ID | GGAGCGGAAGGUAAUGUCCAG | SEQ ID | GGACAUUACCUUCCGCUCC | 0.4470 | |
| | NO: 158 | | NO: | | NO: 2042 | | | |
| | | | 1100 | | | | | |
| MA0159 | SEQ ID | GACAUUACCUUCCGCUCCGAC | SEQ ID | CGGAGCGGAAGGUAAUGUCCA | SEQ ID | GACAUUACCUUCCGCUCCG | 0.3543 | |
| | NO: 159 | | NO: | | NO: 2043 | | | |
| | | | 1101 | | | | | |
| MA0160 | SEQ ID | ACAUUACCUUCCGCUCCGACU | SEQ ID | UCGGAGCGGAAGGUAAUGUCC | SEQ ID | ACAUUACCUUCCGCUCCGA | 0.4627 | * |
| | NO: 160 | | NO: | | NO: 2044 | | | |
| | | | 1102 | | | | | |
| MA0161 | SEQ ID | CAUUACCUUCCGCUCCGACUA | SEQ ID | GUCGGAGCGGAAGGUAAUGUC | SEQ ID | CAUUACCUUCCGCUCCGAC | 0.4652 | |
| | NO: 161 | | NO: | | NO: 2045 | | | |
| | | | 1103 | | | | | |
| MA0162 | SEQ ID | UUACCUUCCGCUCCGACUACU | SEQ ID | UAGUCGGAGCGGAAGGUAAUG | SEQ ID | UUACCUUCCGCUCCGACUA | 0.4862 | |
| | NO: 162 | | NO: | | NO: 2046 | | | |
| | | | 1104 | | | | | |
| MA0163 | SEQ ID | ACCUUCCGCUCCGACUACUCC | SEQ ID | AGUAGUCGGAGCGGAAGGUAA | SEQ ID | ACCUUCCGCUCCGACUACU | 0.5657 | * |
| | NO: 163 | | NO: | | NO: 2047 | | | |
| | | | 1105 | | | | | |
| MA0164 | SEQ ID | CCUUCCGCUCCGACUACUCCA | SEQ ID | GAGUAGUCGGAGCGGAAGGUA | SEQ ID | CCUUCCGCUCCGACUACUC | 0.4293 | |
| | NO: 164 | | NO: | | NO: 2048 | | | |
| | | | 1106 | | | | | |
| MA0165 | SEQ ID | CUUCCGCUCCGACUACUCCAA | SEQ ID | GGAGUAGUCGGAGCGGAAGGU | SEQ ID | CUUCCGCUCCGACUACUCC | 0.4224 | |
| | NO: 165 | | NO: | | NO: 2049 | | | |
| | | | 1107 | | | | | |
| MA0166 | SEQ ID | UCCGACUACUCCAACGAGAAG | SEQ ID | UCUCGUUGGAGUAGUCGGAGC | SEQ ID | UCCGACUACUCCAACGAGA | 0.5686 | * |
| | NO: 166 | | NO: | | NO: 2050 | | | |
| | | | 1108 | | | | | |
| MA0167 | SEQ ID | CCGACUACUCCAACGAGAAGC | SEQ ID | UUCUCGUUGGAGUAGUCGGAG | SEQ ID | CCGACUACUCCAACGAGAA | 0.3156 | |
| | NO: 167 | | NO: | | NO: 2051 | | | |
| | | | 1109 | | | | | |
| MA0168 | SEQ ID | CGACUACUCCAACGAGAAGCC | SEQ ID | CUUCUCGUUGGAGUAGUCGGA | SEQ ID | CGACUACUCCAACGAGAAG | 0.2102 | |
| | NO: 168 | | NO: | | NO: 2052 | | | |
| | | | 1110 | | | | | |
| MA0169 | SEQ ID | ACUCCAACGAGAAGCCGUUCA | SEQ ID | AACGGCUUCUCGUUGGAGUAG | SEQ ID | ACUCCAACGAGAAGCCGUU | 0.3899 | |
| | NO: 169 | | NO: | | NO: 2053 | | | |
| | | | 1111 | | | | | |
| MA0170 | SEQ ID | CUCCAACGAGAAGCCGUUCAC | SEQ ID | GAACGGCUUCUCGUUGGAGUA | SEQ ID | CUCCAACGAGAAGCCGUUC | 0.4075 | |
| | NO: 170 | | NO: | | NO: 2054 | | | |
| | | | 1112 | | | | | |
| MA0171 | SEQ ID | ACGAGAAGCCGUUCACGGGGU | SEQ ID | CCCGUGAACGGCUUCUCGUUG | SEQ ID | ACGAGAAGCCGUUCACGGG | 0.5797 | * |
| | NO: 171 | | NO: | | NO: 2055 | | | |
| | | | 1113 | | | | | |
| MA0172 | SEQ ID | CGAGAAGCCGUUCACGGGGUU | SEQ ID | CCCCGUGAACGGCUUCUCGUU | SEQ ID | CGAGAAGCCGUUCACGGGG | 0.5345 | * |
| | NO: 172 | | NO: | | NO: 2056 | | | |
| | | | 1114 | | | | | |
| MA0173 | SEQ ID | GAGAAGCCGUUCACGGGGUUC | SEQ ID | ACCCCGUGAACGGCUUCUCGU | SEQ ID | GAGAAGCCGUUCACGGGGU | 0.3813 | |
| | NO: 173 | | NO: | | NO: 2057 | | | |
| | | | 1115 | | | | | |
| MA0174 | SEQ ID | GAAGCCGUUCACGGGGUUCGA | SEQ ID | GAACCCCGUGAACGGCUUCUC | SEQ ID | GAAGCCGUUCACGGGGUUC | 0.5874 | * |
| | NO: 174 | | NO: | | NO: 2058 | | | |
| | | | 1116 | | | | | |
| MA0175 | SEQ ID | AGCCGUUCACGGGGUUCGAGG | SEQ ID | UCGAACCCCGUGAACGGCUUC | SEQ ID | AGCCGUUCACGGGGUUCGA | 0.3347 | |
| | NO: 175 | | NO: | | NO: 2059 | | | |
| | | | 1117 | | | | | |
| MA0176 | SEQ ID | CCGUUCACGGGGUUCGAGGCC | SEQ ID | CCUCGAACCCCGUGAACGGCU | SEQ ID | CCGUUCACGGGGUUCGAGG | 0.3233 | |
| | NO: 176 | | NO: | | NO: 2060 | | | |
| | | | 1118 | | | | | |

TABLE 1-5

| double stranded | | | | antisense strand | | | | |
|---|---|---|---|---|---|---|---|---|
| nucleic acid | | sense strand sequence | | sequence | | target MASP2 | relative expression | |
| number | SEQ ID NO: | (5′--->3′) | SEQ ID NO: | (5′--->3′) | SEQ ID NO: | mRNA sequence | level | note |
| MA0177 | SEQ ID | CGUUCACGGGGUUCGAGGCCU | SEQ ID | GCCUCGAACCCCGUGAACGGC | SEQ ID | CGUUCACGGGGUUCGAGGC | 0.4308 | |
| | NO: 177 | | NO: | | NO: 2061 | | | |
| | | | 1119 | | | | | |
| MA0178 | SEQ ID | UCACGGGGUUCGAGGCCUUCU | SEQ ID | AAGGCCUCGAACCCCGUGAAC | SEQ ID | UCACGGGGUUCGAGGCCUU | 0.2955 | |
| | NO: 178 | | NO: | | NO: 2062 | | | |
| | | | 1120 | | | | | |
| MA0179 | SEQ ID | GGGGUUCGAGGCCUUCUAUGC | SEQ ID | AUAGAAGGCCUCGAACCCCGU | SEQ ID | GGGGUUCGAGGCCUUCUAU | 0.4207 | |
| | NO: 179 | | NO: | | NO: 2063 | | | |
| | | | 1121 | | | | | |
| MA0180 | SEQ ID | GGGUUCGAGGCCUUCUAUGCA | SEQ ID | CAUAGAAGGCCUCGAACCCCG | SEQ ID | GGGUUCGAGGCCUUCUAUG | 0.4314 | |
| | NO: 180 | | NO: | | NO: 2064 | | | |
| | | | 1122 | | | | | |
| MA0181 | SEQ ID | GGUUCGAGGCCUUCUAUGCAG | SEQ ID | GCAUAGAAGGCCUCGAACCCC | SEQ ID | GGUUCGAGGCCUUCUAUGC | 0.4212 | |
| | NO: 181 | | NO: | | NO: 2065 | | | |
| | | | 1123 | | | | | |
| MA0182 | SEQ ID | GUUCGAGGCCUUCUAUGCAGC | SEQ ID | UGCAUAGAAGGCCUCGAACCC | SEQ ID | GUUCGAGGCCUUCUAUGCA | 0.3042 | |
| | NO: 182 | | NO: | | NO: 2066 | | | |
| | | | 1124 | | | | | |
| MA0183 | SEQ ID | GGCCUUCUAUGCAGCCGAGGA | SEQ ID | CUCGGCUGCAUAGAAGGCCUC | SEQ ID | GGCCUUCUAUGCAGCCGAG | 0.4830 | * |
| | NO: 183 | | NO: | | NO: 2067 | | | |
| | | | 1125 | | | | | |
| MA0184 | SEQ ID | UCUAUGCAGCCGAGGACAUUG | SEQ ID | AUGUCCUCGGCUGCAUAGAAG | SEQ ID | UCUAUGCAGCCGAGGACAU | 0.4556 | |
| | NO: 184 | | NO: | | NO: 2068 | | | |
| | | | 1126 | | | | | |
| MA0185 | SEQ ID | CUAUGCAGCCGAGGACAUUGA | SEQ ID | AAUGUCCUCGGCUGCAUAGAA | SEQ ID | CUAUGCAGCCGAGGACAUU | 0.5866 | |
| | NO: 185 | | NO: | | NO: 2069 | | | |
| | | | 1127 | | | | | |
| MA0186 | SEQ ID | UAUGCAGCCGAGGACAUUGAC | SEQ ID | CAAUGUCCUCGGCUGCAUAGA | SEQ ID | UAUGGAGCCGAGGACAUUG | 0.4871 | |
| | NO: 186 | | NO: | | NO: 2070 | | | |
| | | | 1128 | | | | | |
| MA0187 | SEQ ID | AUGCAGCCGAGGACAUUGACG | SEQ ID | UCAAUGUCCUCGGCUGCAUAG | SEQ ID | AUGCAGCCGAGGACAUUGA | 0.4939 | |
| | NO: 187 | | NO: | | NO: 2071 | | | |
| | | | 1129 | | | | | |
| MA0188 | SEQ ID | GCAGCCGAGGACAUUGACGAG | SEQ ID | CGUCAAUGUCCUCGGCUGCAU | SEQ ID | GCAGCCGAGGACAUUGACG | 0.4111 | |
| | NO: 188 | | NO: | | NO: 2072 | | | |
| | | | 1130 | | | | | |
| MA0189 | SEQ ID | CAGCCGAGGACAUUGACGAGU | SEQ ID | UCGUCAAUGUCCUCGGCUGCA | SEQ ID | CAGCCGAGGACAUUGACGA | 0.3772 | |
| | NO: 189 | | NO: | | NO: 2073 | | | |
| | | | 1131 | | | | | |
| MA0190 | SEQ ID | AGCCGAGGACAUUGACGAGUG | SEQ ID | CUCGUCAAUGUCCUCGGCUGC | SEQ ID | AGCCGAGGACAUUGACGAG | 0.5403 | * |
| | NO: 190 | | NO: | | NO: 2074 | | | |
| | | | 1132 | | | | | |
| MA0191 | SEQ ID | GCCGAGGACAUUGACGAGUGC | SEQ ID | ACUCGUCAAUGUCCUCGGCUG | SEQ ID | GCCGAGGACAUUGACGAGU | 0.5877 | * |
| | NO: 191 | | NO: | | NO: 2075 | | | |
| | | | 1133 | | | | | |
| MA0192 | SEQ ID | CCGAGGACAUUGACGAGUGCC | SEQ ID | CACUCGUCAAUGUCCUCGGCU | SEQ ID | CCGAGGACAUUGACGAGUG | 0.5236 | * |
| | NO: 192 | | NO: | | NO: 2076 | | | |
| | | | 1134 | | | | | |
| MA0193 | SEQ ID | CGAGGACAUUGACGAGUGCCA | SEQ ID | GCACUCGUCAAUGUCCUCGGC | SEQ ID | CGAGGACAUUGACGAGUGC | 0.5510 | |
| | NO: 193 | | NO: | | NO: 2077 | | | |
| | | | 1135 | | | | | |
| MA0194 | SEQ ID | AGUGCCAGGUGGCCCCGGGAG | SEQ ID | CCCGGGGCCACCUGGCACUCG | SEQ ID | AGUGCCAGGUGGCCCCGGG | 0.4975 | |
| | NO: 194 | | NO: | | NO: 2078 | | | |
| | | | 1136 | | | | | |
| MA0195 | SEQ ID | GGAGAGGCGCCCACCUGCGAC | SEQ ID | CGCAGGUGGGCGCCUCUCCCG | SEQ ID | GGAGAGGCGCCCACCUGCG | 0.5445 | * |
| | NO: 195 | | NO: | | NO: 2079 | | | |
| | | | 1137 | | | | | |
| MA0196 | SEQ ID | GAGAGGCGCCCACCUGCGACC | SEQ ID | UCGCAGGUGGGCGCCUCUCCC | SEQ ID | GAGAGGCGCCCACCUGCGA | 0.5389 | * |
| | NO: 196 | | NO: | | NO: 2080 | | | |
| | | | 1138 | | | | | |
| MA0197 | SEQ ID | CCCACCUGCGACCACCACUGC | SEQ ID | AGUGGUGGUCGCAGGUGGGCG | SEQ ID | CCCACCUGCGACCACCACU | 0.5541 | * |
| | NO: 197 | | NO: | | NO: 2081 | | | |
| | | | 1139 | | | | | |
| MA0198 | SEQ ID | GCGACCACCACUGCCACAACC | SEQ ID | UUGUGGCAGUGGUGGUCGCAG | SEQ ID | GCGACCACCACUGCCACAA | 0.4922 | * |
| | NO: 198 | | NO: | | NO: 2082 | | | |
| | | | 1140 | | | | | |
| MA0199 | SEQ ID | CGACCACCACUGCCACAACCA | SEQ ID | GUUGUGGCAGUGGUGGUCGCA | SEQ ID | CGACCACCACUGCCACAAC | 0.4492 | |
| | NO: 199 | | NO: | | NO: 2083 | | | |
| | | | 1141 | | | | | |
| MA0200 | SEQ ID | ACCACCACUGCCACAACCACC | SEQ ID | UGGUUGUGGCAGUGGUGGUCG | SEQ ID | ACCACCACUGCCACAACCA | 0.4760 | |
| | NO: 200 | | NO: | | NO: 2084 | | | |
| | | | 1142 | | | | | |
| MA0201 | SEQ ID | CCACCACUGCCACAACCACCU | SEQ ID | GUGGUUGUGGCAGUGGUGGUC | SEQ ID | CCACCACUGCCACAACCAC | 0.4698 | * |
| | NO: 201 | | NO: | | NO: 2085 | | | |
| | | | 1143 | | | | | |
| MA0202 | SEQ ID | ACCACUGCCACAACCACCUGG | SEQ ID | AGGUGGUUGUGGCAGUGGUGG | SEQ ID | ACCACUGCCACAACCACCU | 0.5277 | * |
| | NO: 202 | | NO: | | NO: 2086 | | | |
| | | | 1144 | | | | | |
| MA0203 | SEQ ID | CCACUGCCACAACCACCUGGG | SEQ ID | CAGGUGGUUGUGGCAGUGGUG | SEQ ID | CCACUGCCACAACCACCUG | 0.4527 | |
| | NO: 203 | | NO: | | NO: 2087 | | | |
| | | | 1145 | | | | | |
| MA0204 | SEQ ID | ACUGCCACAACCACCUGGGCG | SEQ ID | CCCAGGUGGUUGUGGCAGUGG | SEQ ID | ACUGCCACAACCACCUGGG | 0.5410 | * |
| | NO: 204 | | NO: | | NO: 2088 | | | |
| | | | 1146 | | | | | |
| MA0205 | SEQ ID | GCCACAACCACCUGGGCGGUU | SEQ ID | CCGCCCAGGUGGUUGUGGCAG | SEQ ID | GCCACAACCACCUGGGCGG | 0.5442 | * |
| | NO: 205 | | NO: | | NO: 2089 | | | |
| | | | 1147 | | | | | |
| MA0206 | SEQ ID | CACAACCACCUGGGCGGUUUC | SEQ ID | AACCGCCCAGGUGGUUGUGGC | SEQ ID | CACAACCACCUGGGCGGUU | 0.5043 | |
| | NO: 206 | | NO: | | NO: 2090 | | | |
| | | | 1148 | | | | | |
| MA0207 | SEQ ID | ACAACCACCUGGGCGGUUUCU | SEQ ID | AAACCGCCCAGGUGGUUGUGG | SEQ ID | ACAACCACCUGGGCGGUUU | 0.3048 | |
| | NO: 207 | | NO: | | NO: 2091 | | | |
| | | | 1149 | | | | | |
| MA0208 | SEQ ID | CAACCACCUGGGCGGUUUCUA | SEQ ID | GAAACCGCCCAGGUGGUUGUG | SEQ ID | CAACCACCUGGGCGGUUUC | 0.2445 | |
| | NO: 208 | | NO: | | NO: 2092 | | | |
| | | | 1150 | | | | | |
| MA0209 | SEQ ID | CCACCUGGGCGGUUUCUACUG | SEQ ID | GUAGAAACCGCCCAGGUGGUU | SEQ ID | CCACCUGGGCGGUUUCUAC | 0.5105 | * |
| | NO: 209 | | NO: | | NO: 2093 | | | |
| | | | 1151 | | | | | |
| MA0210 | SEQ ID | GGGCGGUUUCUACUGCUCCUG | SEQ ID | GGAGCAGUAGAAACCGCCCAG | SEQ ID | GGGCGGUUUCUACUGCUCC | 0.4838 | |
| | NO: 210 | | NO: | | NO: 2094 | | | |
| | | | 1152 | | | | | |
| MA0211 | SEQ ID | GGCGGUUUCUACUGCUCCUGC | SEQ ID | AGGAGCAGUAGAAACCGCCCA | SEQ ID | GGCGGUUUCUACUGCUCCU | 0.2747 | |
| | NO: 211 | | NO: | | NO: 2095 | | | |
| | | | 1153 | | | | | |
| MA0212 | SEQ ID | GCGGUUUCUACUGCUCCUGCC | SEQ ID | CAGGAGCAGUAGAAACCGCCC | SEQ ID | GCGGUUUCUACUGCUCCUG | 0.2057 | |
| | NO: 212 | | NO: | | NO: 2096 | | | |
| | | | 1154 | | | | | |
| MA0213 | SEQ ID | CGGUUUCUACUGCUCCUGCCG | SEQ ID | GCAGGAGCAGUAGAAACCGCC | SEQ ID | CGGUUUCUACUGCUCCUGC | 0.5748 | |
| | NO: 213 | | NO: | | NO: 2097 | | | |
| | | | 1155 | | | | | |
| MA0214 | SEQ ID | GUUUCUACUGCUCCUGCCGCG | SEQ ID | CGGCAGGAGCAGUAGAA | SEQ ID | GUUUCUACUGCUCCUGCCG | 0.3691 | |
| | NO: 214 | | NO: | | NO: 2098 | | | |
| | | | 1156 | | | | | |
| MA0215 | SEQ ID | GCUCCUGCCGCGCAGGCUACG | SEQ ID | UAGCCUGCGCGGCAGGAGCAG | SEQ ID | GCUCCUGCCGCGCAGGCUA | 0.5681 | * |
| | NO: 215 | | NO: | | NO: 2099 | | | |
| | | | 1157 | | | | | |
| MA0216 | SEQ ID | CUGCCGCGCAGGCUACGUCCU | SEQ ID | GACGUAGCCUGCGCGGCAGGA | SEQ ID | CUGCCGCGCAGGCUACGUC | 0.4764 | * |
| | NO: 216 | | NO: | | NO: 2100 | | | |
| | | | 1158 | | | | | |
| MA0217 | SEQ ID | GGCUACGUCCUGCACCGUAAC | SEQ ID | UACGGUGCAGGACGUAGCCUG | SEQ ID | GGCUACGUCCUGCACCGUA | 0.1601 | |
| | NO: 217 | | NO: | | NO: 2101 | | | |
| | | | 1159 | | | | | |
| MA0218 | SEQ ID | GCUACGUCCUGCACCGUAACA | SEQ ID | UUACGGUGCAGGACGUAGCCU | SEQ ID | GCUACGUCCUGCACCGUAA | 0.3361 | |
| | NO: 218 | | NO: | | NO: 2102 | | | |
| | | | 1160 | | | | | |
| MA0219 | SEQ ID | CUACGUCCUGCACCGUAACAA | SEQ ID | GUUACGGUGCAGGACGUAGCC | SEQ ID | CUACGUCCUGCACCGUAAC | 0.3681 | |
| | NO: 219 | | NO: | | NO: 2103 | | | |
| | | | 1161 | | | | | |
| MA0220 | SEQ ID | ACGUCCUGCACCGUAACAAGC | SEQ ID | UUGUUACGGUGCAGGACGUAG | SEQ ID | ACGUCCUGCACCGUAACAA | 0.3200 | |
| | NO: 220 | | NO: | | NO: 2104 | | | |
| | | | 1162 | | | | | |

TABLE 1-6

| double stranded | | | | antisense strand | | | | |
|---|---|---|---|---|---|---|---|---|
| nucleic acid | | sense strand sequence | | sequence | | target MASP2 | relative expression | |
| number | SEQ ID NO: | (5′--->3′) | SEQ ID NO: | (5′--->3′) | SEQ ID NO: | mRNA sequence | level | note |
| MA0221 | SEQ ID | CGUCCUGCACCGUAACAAGCG | SEQ ID | CUUGUUACGGUGCAGGACGUA | SEQ ID | CGUCCUGCACCGUAACAAG | 0.3384 | |
| | NO: 221 | | NO: | | NO: 2105 | | | |
| | | | 1163 | | | | | |
| MA0222 | SEQ ID | CUGCACCGUAACAAGCGCACC | SEQ ID | UGCGCUUGUUACGGUGCAGGA | SEQ ID | CUGCACCGUAACAAGCGCA | 0.4278 | |
| | NO: 222 | | NO: | | NO: 2106 | | | |
| | | | 1164 | | | | | |
| MA0223 | SEQ ID | GCACCGUAACAAGCGCACCUG | SEQ ID | GGUGCGCUUGUUACGGUGCAG | SEQ ID | GCACCGUAACAAGCGCACC | 0.3737 | |
| | NO: 223 | | NO: | | NO: 2107 | | | |
| | | | 1165 | | | | | |
| MA0224 | SEQ ID | CACCGUAACAAGCGCACCUGC | SEQ ID | AGGUGCGCUUGUUACGGUGCA | SEQ ID | CACCGUAACAAGCGCACCU | 0.5596 | |
| | NO: 224 | | NO: | | NO: 2108 | | | |
| | | | 1166 | | | | | |
| MA0225 | SEQ ID | CCGUAACAAGCGCACCUGCUC | SEQ ID | GCAGGUGCGCUUGUUACGGUG | SEQ ID | CCGUAACAAGCGCACCUGC | 0.5756 | |
| | NO: 225 | | NO: | | NO: 2109 | | | |
| | | | 1167 | | | | | |
| MA0226 | SEQ ID | CGUAACAAGCGCACCUGCUCA | SEQ ID | AGCAGGUGCGCUUGUUACGGU | SEQ ID | CGUAACAAGCGCACCUGCU | 0.4483 | |
| | NO: 226 | | NO: | | NO: 2110 | | | |
| | | | 1168 | | | | | |
| MA0227 | SEQ ID | CAAGCGCACCUGCUCAGCCCU | SEQ ID | GGCUGAGCAGGUGCGCUUGUU | SEQ ID | CAAGCGCACCUGCUCAGCC | 0.5864 | * |
| | NO: 227 | | NO: | | NO: 2111 | | | |
| | | | 1169 | | | | | |
| MA0228 | SEQ ID | GCCAGGUCUUCACCCAGAGGU | SEQ ID | CUCUGGGUGAAGACCUGGCCG | SEQ ID | GCCAGGUCUUCACCCAGAG | 0.4282 | |
| | NO: 228 | | NO: | | NO: 2112 | | | |
| | | | 1170 | | | | | |
| MA0229 | SEQ ID | AGGUCUUCACCCAGAGGUCUG | SEQ ID | GACCUCUGGGUGAAGACCUGG | SEQ ID | AGGUCUUCACCCAGAGGUC | 0.4223 | |
| | NO: 229 | | NO: | | NO: 2113 | | | |
| | | | 1171 | | | | | |
| MA0230 | SEQ ID | ACCCAGAGGUCUGGGGAGCUC | SEQ ID | GCUCCCCAGACCUCUGGGUGA | SEQ ID | ACCCAGAGGUCUGGGGAGC | 0.5581 | * |
| | NO: 230 | | NO: | | NO: 2114 | | | |
| | | | 1172 | | | | | |
| MA0231 | SEQ ID | CCCAGAGGUCUGGGGAGCUCA | SEQ ID | AGCUCCCCAGACCUCUGGGUG | SEQ ID | CCCAGAGGUCUGGGGAGCU | 0.4251 | |
| | NO: 231 | | NO: | | NO: 2115 | | | |
| | | | 1173 | | | | | |
| MA0232 | SEQ ID | CCAGAGGUCUGGGGAGCUCAG | SEQ ID | GAGCUCCCCAGACCUCUGGGU | SEQ ID | CCAGAGGUCUGGGGAGCUC | 0.4255 | |
| | NO: 232 | | NO: | | NO: 2116 | | | |
| | | | 1174 | | | | | |
| MA0233 | SEQ ID | CAGAGGUCUGGGGAGCUCAGC | SEQ ID | UGAGCUCCCCAGACCUCUGGG | SEQ ID | CAGAGGUCUGGGGAGCUCA | 0.3198 | |
| | NO: 233 | | NO: | | NO: 2117 | | | |
| | | | 1175 | | | | | |
| MA0234 | SEQ ID | AGAGGUCUGGGGAGCUCAGCA | SEQ ID | CUGAGCUCCCCAGACCUCUGG | SEQ ID | AGAGGUCUGGGGAGCUCAG | 0.5290 | * |
| | NO: 234 | | NO: | | NO: 2118 | | | |
| | | | 1176 | | | | | |
| MA0235 | SEQ ID | GGUCUGGGGAGCUCAGCAGCC | SEQ ID | CUGCUGAGCUCCCCAGACCUC | SEQ ID | GGUCUGGGGAGCUCAGCAG | 0.5204 | * |
| | NO: 235 | | NO: | | NO: 2119 | | | |
| | | | 1177 | | | | | |
| MA0236 | SEQ ID | UGGGGAGCUCAGCAGCCCUGA | SEQ ID | AGGGCUGCUGAGCUCCCCAGA | SEQ ID | UGGGGAGCUCAGCAGCCCU | 0.4872 | |
| | NO: 236 | | NO: | | NO: 2120 | | | |
| | | | 1178 | | | | | |
| MA0237 | SEQ ID | GGGGAGCUCAGCAGCCCUGAA | SEQ ID | CAGGGCUGCUGAGCUCCCCAG | SEQ ID | GGGGAGCUCAGCAGCCCUG | 0.4882 | * |
| | NO: 237 | | NO: | | NO: 2121 | | | |
| | | | 1179 | | | | | |
| MA0238 | SEQ ID | GGAGCUCAGCAGCCCUGAAUA | SEQ ID | UUCAGGGCUGCUGAGCUCCCC | SEQ ID | GGAGCUCAGCAGCCCUGAA | 0.4859 | * |
| | NO: 238 | | NO: | | NO: 2122 | | | |
| | | | 1180 | | | | | |
| MA0239 | SEQ ID | GAGCUCAGCAGCCCUGAAUAC | SEQ ID | AUUCAGGGCUGCUGAGCUCCC | SEQ ID | GAGCUCAGCAGCCCUGAAU | 0.3060 | |
| | NO: 239 | | NO: | | NO: 2123 | | | |
| | | | 1181 | | | | | |
| MA0240 | SEQ ID | GCUCAGCAGCCCUGAAUACCC | SEQ ID | GUAUUCAGGGCUGCUGAGCUC | SEQ ID | GCUCAGCAGCCCUGAAUAC | 0.3323 | |
| | NO: 240 | | NO: | | NO: 2124 | | | |
| | | | 1182 | | | | | |
| MA0241 | SEQ ID | CAGCAGCCCUGAAUACCCACG | SEQ ID | UGGGUAUUCAGGGCUGCUGAG | SEQ ID | CAGCAGCCCUGAAUACCCA | 0.3482 | |
| | NO: 241 | | NO: | | NO: 2125 | | | |
| | | | 1183 | | | | | |
| MA0242 | SEQ ID | AGCAGCCCUGAAUACCCACGG | SEQ ID | GUGGGUAUUCAGGGCUGCUGA | SEQ ID | AGCAGCCCUGAAUACCCAC | 0.4790 | * |
| | NO: 242 | | NO: | | NO: 2126 | | | |
| | | | 1184 | | | | | |
| MA0243 | SEQ ID | GCAGCCCUGAAUACCCACGGC | SEQ ID | CGUGGGUAUUCAGGGCUGCUG | SEQ ID | GCAGCCCUGAAUACCCACG | 0.4401 | |
| | NO: 243 | | NO: | | NO: 2127 | | | |
| | | | 1185 | | | | | |
| MA0244 | SEQ ID | CUGAAUACCCACGGCCGUAUC | SEQ ID | UACGGCCGUGGGUAUUCAGGG | SEQ ID | CUGAAUACCCACGGCCGUA | 0.4632 | * |
| | NO: 244 | | NO: | | NO: 2128 | | | |
| | | | 1186 | | | | | |
| MA0245 | SEQ ID | CCCACGGCCGUAUCCCAAACU | SEQ ID | UUUGGGAUACGGCCGUGGGUA | SEQ ID | CCCACGGCCGUAUCCCAAA | 0.3487 | |
| | NO: 245 | | NO: | | NO: 2129 | | | |
| | | | 1187 | | | | | |
| MA0246 | SEQ ID | CCACGGCCGUAUCCCAAACUC | SEQ ID | GUUUGGGAUACGGCCGUGGGU | SEQ ID | CCACGGCCGUAUCCCAAAC | 0.5145 | * |
| | NO: 246 | | NO: | | NO: 2130 | | | |
| | | | 1188 | | | | | |
| MA0247 | SEQ ID | GGCCGUAUCCCAAACUCUCCA | SEQ ID | GAGAGUUUGGGAUACGGCCGU | SEQ ID | GGCCGUAUCCCAAACUCUC | 0.3928 | |
| | NO: 247 | | NO: | | NO: 2131 | | | |
| | | | 1189 | | | | | |
| MA0248 | SEQ ID | GCCGUAUCCCAAACUCUCCAG | SEQ ID | GGAGAGUUUGGGAUACGGCCG | SEQ ID | GCCGUAUCCCAAACUCUCC | 0.2896 | |
| | NO: 248 | | NO: | | NO: 2132 | | | |
| | | | 1190 | | | | | |
| MA0249 | SEQ ID | CGUAUCCCAAACUCUCCAGUU | SEQ ID | CUGGAGAGUUUGGGAUACGGC | SEQ ID | CGUAUCCCAAACUCUCCAG | 0.5478 | * |
| | NO: 249 | | NO: | | NO: 2133 | | | |
| | | | 1191 | | | | | |
| MA0250 | SEQ ID | GUAUCCCAAACUCUCCAGUUG | SEQ ID | ACUGGAGAGUUUGGGAUACGG | SEQ ID | GUAUCCCAAACUCUCCAGU | 0.3549 | |
| | NO: 250 | | NO: | | NO: 2134 | | | |
| | | | 1192 | | | | | |
| MA0251 | SEQ ID | UAUCCCAAACUCUCCAGUUGC | SEQ ID | AACUGGAGAGUUUGGGAUACG | SEQ ID | UAUCCCAAACUCUCCAGUU | 0.5827 | * |
| | NO: 251 | | NO: | | NO: 2135 | | | |
| | | | 1193 | | | | | |
| MA0252 | SEQ ID | CCCAAACUCUCCAGUUGCACU | SEQ ID | UGCAACUGGAGAGUUUGGGAU | SEQ ID | CCCAAACUCUCCAGUUGCA | 0.4890 | |
| | NO: 252 | | NO: | | NO: 2136 | | | |
| | | | 1194 | | | | | |
| MA0253 | SEQ ID | CAAACUCUCCAGUUGCACUUA | SEQ ID | AGUGCAACUGGAGAGUUUGGG | SEQ ID | CAAACUCUCCAGUUGCACU | 0.2475 | |
| | NO: 253 | | NO: | | NO: 2137 | | | |
| | | | 1195 | | | | | |
| MA0254 | SEQ ID | AAACUCUCCAGUUGCACUUAC | SEQ ID | AAGUGCAACUGGAGAGUUUGG | SEQ ID | AAACUCUCCAGUUGCACUU | 0.4343 | |
| | NO: 254 | | NO: | | NO: 2138 | | | |
| | | | 1196 | | | | | |
| MA0255 | SEQ ID | AACUCUCCAGUUGCACUUACA | SEQ ID | UAAGUGCAACUGGAGAGUUUG | SEQ ID | AACUCUCCAGUUGCACUUA | 0.4009 | |
| | NO: 255 | | NO: | | NO: 2139 | | | |
| | | | 1197 | | | | | |
| MA0256 | SEQ ID | ACUCUCCAGUUGCACUUACAG | SEQ ID | GUAAGUGCAACUGGAGAGUUU | SEQ ID | ACUCUCCAGUUGCACUUAC | 0.4885 | |
| | NO: 256 | | NO: | | NO: 2140 | | | |
| | | | 1198 | | | | | |
| MA0257 | SEQ ID | CUCUCCAGUUGCACUUACAGC | SEQ ID | UGUAAGUGCAACUGGAGAGUU | SEQ ID | CUCUCCAGUUGCACUUACA | 0.4848 | |
| | NO: 257 | | NO: | | NO: 2141 | | | |
| | | | 1199 | | | | | |
| MA0258 | SEQ ID | UCCAGUUGCACUUACAGCAUC | SEQ ID | UGCUGUAAGUGCAACUGGAGA | SEQ ID | UCCAGUUGCACUUACAGCA | 0.4608 | |
| | NO: 258 | | NO: | | NO: 2142 | | | |
| | | | 1200 | | | | | |
| MA0259 | SEQ ID | CCAGUUGCACUUACAGCAUCA | SEQ ID | AUGCUGUAAGUGCAACUGGAG | SEQ ID | CCAGUUGCACUUACAGCAU | 0.1664 | |
| | NO: 259 | | NO: | | NO: 2143 | | | |
| | | | 1201 | | | | | |
| MA0260 | SEQ ID | CAGUUGCACUUACAGCAUCAG | SEQ ID | GAUGCUGUAAGUGCAACUGGA | SEQ ID | CAGUUGCACUUACAGCAUC | 0.2499 | |
| | NO: 260 | | NO: | | NO: 2144 | | | |
| | | | 1202 | | | | | |
| MA0261 | SEQ ID | AGUUGCACUUACAGCAUCAGC | SEQ ID | UGAUGCUGUAAGUGCAACUGG | SEQ ID | AGUUGCACUUACAGCAUCA | 0.1704 | |
| | NO: 261 | | NO: | | NO: 2145 | | | |
| | | | 1203 | | | | | |
| MA0262 | SEQ ID | GUUGCACUUACAGCAUCAGCC | SEQ ID | CUGAUGCUGUAAGUGCAACUG | SEQ ID | GUUGCACUUACAGCAUCAG | 0.3034 | |
| | NO: 262 | | NO: | | NO: 2146 | | | |
| | | | 1204 | | | | | |
| MA0263 | SEQ ID | CACUUACAGCAUCAGCCUGGA | SEQ ID | CAGGCUGAUGCUGUAAGUGCA | SEQ ID | CACUUACAGCAUCAGCCUG | 0.4214 | |
| | NO: 263 | | NO: | | NO: 2147 | | | |
| | | | 1205 | | | | | |
| MA0264 | SEQ ID | CUUACAGCAUCAGCCUGGAGG | SEQ ID | UCCAGGCUGAUGCUGUAAGUG | SEQ ID | CUUACAGCAUCAGCCUGGA | 0.5230 | |
| | NO: 264 | | NO: | | NO: 2148 | | | |
| | | | 1206 | | | | | |

TABLE 1-7

| double stranded | | | | antisense strand | | | | |
|---|---|---|---|---|---|---|---|---|
| nucleic acid | | sense strand sequence | | sequence | | target MASP2 | relative expression | |
| number | SEQ ID NO: | (5′--->3′) | SEQ ID NO: | (5′--->3′) | SEQ ID NO: | mRNA sequence | level | note |
| MA0265 | SEQ ID | GCAUCAGCCUGGAGGAGGGGU | SEQ ID | CCCUCCUCCAGGCUGAUGCUG | SEQ ID | GCAUCAGCCUGGAGGAGGG | 0.5629 | * |
| | NO: 265 | | NO: | | NO: 2149 | | | |
| | | | 1207 | | | | | |
| MA0266 | SEQ ID | UCAGCCUGGAGGAGGGGUUCA | SEQ ID | AACCCCUCCUCCAGGCUGAUG | SEQ ID | UCAGCCUGGAGGAGGGGUU | 0.5551 | |
| | NO: 266 | | NO: | | NO: 2150 | | | |
| | | | 1208 | | | | | |
| MA0267 | SEQ ID | CCUGGAGGAGGGGUUCAGUGU | SEQ ID | ACUGAACCCCUCCUCCAGGCU | SEQ ID | CCUGGAGGAGGGGUUCAGU | 0.5903 | * |
| | NO: 267 | | NO: | | NO: 2151 | | | |
| | | | 1209 | | | | | |
| MA0268 | SEQ ID | CUGGAGGAGGGGUUCAGUGUC | SEQ ID | CACUGAACCCCUCCUCCAGGC | SEQ ID | CUGGAGGAGGGGUUCAGUG | 0.4717 | * |
| | NO: 268 | | NO: | | NO: 2152 | | | |
| | | | 1210 | | | | | |
| MA0269 | SEQ ID | UGGAGGAGGGGUUCAGUGUCA | SEQ ID | ACACUGAACCCCUCCUCCAGG | SEQ ID | UGGAGGAGGGGUUCAGUGU | 0.4069 | |
| | NO: 269 | | NO: | | NO: 2153 | | | |
| | | | 1211 | | | | | |
| MA0270 | SEQ ID | GGAGGAGGGGUUCAGUGUCAU | SEQ ID | GACACUGAACCCCUCCUCCAG | SEQ ID | GGAGGAGGGGUUCAGUGUC | 0.5705 | |
| | NO: 270 | | NO: | | NO: 2154 | | | |
| | | | 1212 | | | | | |
| MA0271 | SEQ ID | GAGGAGGGGUUCAGUGUCAUU | SEQ ID | UGACACUGAACCCCUCCUCCA | SEQ ID | GAGGAGGGGUUCAGUGUCA | 0.5201 | * |
| | NO: 271 | | NO: | | NO: 2155 | | | |
| | | | 1213 | | | | | |
| MA0272 | SEQ ID | AGGAGGGGUUCAGUGUCAUUC | SEQ ID | AUGACACUGAACCCCUCCUCC | SEQ ID | AGGAGGGGUUCAGUGUCAU | 0.4697 | |
| | NO: 272 | | NO: | | NO: 2156 | | | |
| | | | 1214 | | | | | |
| MA0273 | SEQ ID | GGAGGGGUUCAGUGUCAUUCU | SEQ ID | AAUGACACUGAACCCCUCCUC | SEQ ID | GGAGGGGUUCAGUGUCAUU | 0.3886 | |
| | NO: 273 | | NO: | | NO: 2157 | | | |
| | | | 1215 | | | | | |
| MA0274 | SEQ ID | GAGGGGUUCAGUGUCAUUCUG | SEQ ID | GAAUGACACUGAACCCCUCCU | SEQ ID | GAGGGGUUCAGUGUCAUUC | 0.3832 | |
| | NO: 274 | | NO: | | NO: 2158 | | | |
| | | | 1216 | | | | | |
| MA0275 | SEQ ID | GGGGUUCAGUGUCAUUCUGGA | SEQ ID | CAGAAUGACACUGAACCCCUC | SEQ ID | GGGGUUCAGUGUCAUUCUG | 0.2600 | |
| | NO: 275 | | NO: | | NO: 2159 | | | |
| | | | 1217 | | | | | |
| MA0276 | SEQ ID | GGUUCAGUGUCAUUCUGGACU | SEQ ID | UCCAGAAUGACACUGAACCCC | SEQ ID | GGUUCAGUGUCAUUCUGGA | 0.4765 | |
| | NO: 276 | | NO: | | NO: 2160 | | | |
| | | | 1218 | | | | | |
| MA0277 | SEQ ID | GUUCAGUGUCAUUCUGGACUU | SEQ ID | GUCCAGAAUGACACUGAACCC | SEQ ID | GUUCAGUGUCAUUCUGGAC | 0.4706 | |
| | NO: 277 | | NO: | | NO: 2161 | | | |
| | | | 1219 | | | | | |
| MA0278 | SEQ ID | UCAGUGUCAUUCUGGACUUUG | SEQ ID | AAGUCCAGAAUGACACUGAAC | SEQ ID | UCAGUGUCAUUCUGGACUU | 0.3636 | |
| | NO: 278 | | NO: | | NO: 2162 | | | |
| | | | 1220 | | | | | |
| MA0279 | SEQ ID | CAGUGUCAUUCUGGACUUUGU | SEQ ID | AAAGUCCAGAAUGACACUGAA | SEQ ID | CAGUGUCAUUCUGGACUUU | 0.4409 | |
| | NO: 279 | | NO: | | NO: 2163 | | | |
| | | | 1221 | | | | | |
| MA0280 | SEQ ID | AGUGUCAUUCUGGACUUUGUG | SEQ ID | CAAAGUCCAGAAUGACACUGA | SEQ ID | AGUGUCAUUCUGGACUUUG | 0.2410 | |
| | NO: 280 | | NO: | | NO: 2164 | | | |
| | | | 1222 | | | | | |
| MA0281 | SEQ ID | GUGUCAUUCUGGACUUUGUGG | SEQ ID | ACAAAGUCCAGAAUGACACUG | SEQ ID | GUGUCAUUCUGGACUUUGU | 0.5820 | |
| | NO: 281 | | NO: | | NO: 2165 | | | |
| | | | 1223 | | | | | |
| MA0282 | SEQ ID | GACUUUGUGGAGUCCUUCGAU | SEQ ID | CGAAGGACUCCACAAAGUCCA | SEQ ID | GACUUUGUGGAGUCCUUCG | 0.4390 | |
| | NO: 282 | | NO: | | NO: 2166 | | | |
| | | | 1224 | | | | | |
| MA0283 | SEQ ID | ACUUUGUGGAGUCCUUCGAUG | SEQ ID | UCGAAGGACUCCACAAAGUCC | SEQ ID | ACUUUGUGGAGUCCUUCGA | 0.4999 | |
| | NO: 283 | | NO: | | NO: 2167 | | | |
| | | | 1225 | | | | | |
| MA0284 | SEQ ID | UUGUGGAGUCCUUCGAUGUGG | SEQ ID | ACAUCGAAGGACUCCACAAAG | SEQ ID | UUGUGGAGUCCUUCGAUGU | 0.4765 | |
| | NO: 284 | | NO: | | NO: 2168 | | | |
| | | | 1226 | | | | | |
| MA0285 | SEQ ID | UGUGGAGUCCUUCGAUGUGGA | SEQ ID | CACAUCGAAGGACUCCACAAA | SEQ ID | UGUGGAGUCCUUCGAUGUG | 0.5529 | * |
| | NO: 285 | | NO: | | NO: 2169 | | | |
| | | | 1227 | | | | | |
| MA0286 | SEQ ID | UGGAGUCCUUCGAUGUGGAGA | SEQ ID | UCCACAUCGAAGGACUCCACA | SEQ ID | UGGAGUCCUUCGAUGUGGA | 0.4499 | |
| | NO: 286 | | NO: | | NO: 2170 | | | |
| | | | 1228 | | | | | |
| MA0287 | SEQ ID | GAGUCCUUCGAUGUGGAGACA | SEQ ID | UCUCCACAUCGAAGGACUCCA | SEQ ID | GAGUCCUUCGAUGUGGAGA | 0.4828 | |
| | NO: 287 | | NO: | | NO: 2171 | | | |
| | | | 1229 | | | | | |
| MA0288 | SEQ ID | AGUCCUUCGAUGUGGAGACAC | SEQ ID | GUCUCCACAUCGAAGGACUCC | SEQ ID | AGUCCUUCGAUGUGGAGAC | 0.4890 | * |
| | NO: 288 | | NO: | | NO: 2172 | | | |
| | | | 1230 | | | | | |
| MA0289 | SEQ ID | GUCCUUCGAUGUGGAGACACA | SEQ ID | UGUCUCCACAUCGAAGGACUC | SEQ ID | GUCCUUCGAUGUGGAGACA | 0.5328 | |
| | NO: 289 | | NO: | | NO: 2173 | | | |
| | | | 1231 | | | | | |
| MA0290 | SEQ ID | CCUUCGAUGUGGAGACACACC | SEQ ID | UGUGUCUCCACAUCGAAGGAC | SEQ ID | CCUUCGAUGUGGAGACACA | 0.2342 | |
| | NO: 290 | | NO: | | NO: 2174 | | | |
| | | | 1232 | | | | | |
| MA0291 | SEQ ID | CUUCGAUGUGGAGACACACCC | SEQ ID | GUGUGUCUCCACAUCGAAGGA | SEQ ID | CUUCGAUGUGGAGACACAC | 0.3618 | |
| | NO: 291 | | NO: | | NO: 2175 | | | |
| | | | 1233 | | | | | |
| MA0292 | SEQ ID | AUGUGGAGACACACCCUGAAA | SEQ ID | UCAGGGUGUGUCUCCACAUCG | SEQ ID | AUGUGGAGACACACCCUGA | 0.3168 | |
| | NO: 292 | | NO: | | NO: 2176 | | | |
| | | | 1234 | | | | | |
| MA0293 | SEQ ID | UGUGGAGACACACCCUGAAAC | SEQ ID | UUCAGGGUGUGUCUCCACAUC | SEQ ID | UGUGGAGACACACCCUGAA | 0.2669 | |
| | NO: 293 | | NO: | | NO: 2177 | | | |
| | | | 1235 | | | | | |
| MA0294 | SEQ ID | GUGGAGACACACCCUGAAACC | SEQ ID | UUUCAGGGUGUGUCUCCACAU | SEQ ID | GUGGAGACACACCCUGAAA | 0.1774 | |
| | NO: 294 | | NO: | | NO: 2178 | | | |
| | | | 1236 | | | | | |
| MA0295 | SEQ ID | GGAGACACACCCUGAAACCCU | SEQ ID | GGUUUCAGGGUGUGUCUCCAC | SEQ ID | GGAGACACACCCUGAAACC | 0.4785 | * |
| | NO: 295 | | NO: | | NO: 2179 | | | |
| | | | 1237 | | | | | |
| M20296 | SEQ ID | AGACACACCCUGAAACCCUGU | SEQ ID | AGGGUUUCAGGGUGUGUCUCC | SEQ ID | AGACACACCCUGAAACCCU | 0.4949 | * |
| | NO: 296 | | NO: | | NO: 2180 | | | |
| | | | 1238 | | | | | |
| MA0297 | SEQ ID | ACACACCCUGAAACCCUGUGU | SEQ ID | ACAGGGUUUCAGGGUGUGUCU | SEQ ID | ACACACCCUGAAACCCUGU | 0.4851 | * |
| | NO: 297 | | NO: | | NO: 2181 | | | |
| | | | 1239 | | | | | |
| MA0298 | SEQ ID | CACACCCUGAAACCCUGUGUC | SEQ ID | CACAGGGUUUCAGGGUGUGUC | SEQ ID | CACACCCUGAAACCCUGUG | 0.5144 | * |
| | NO: 298 | | NO: | | NO: 2182 | | | |
| | | | 1240 | | | | | |
| MA0299 | SEQ ID | CACCCUGAAACCCUGUGUCCC | SEQ ID | GACACAGGGUUUCAGGGUGUG | SEQ ID | CACCCUGAAACCCUGUGUC | 0.3305 | |
| | NO: 299 | | NO: | | NO: 2183 | | | |
| | | | 1241 | | | | | |
| MA0300 | SEQ ID | ACCCUGAAACCCUGUGUCCCU | SEQ ID | GGACACAGGGUUUCAGGGUGU | SEQ ID | ACCCUGAAACCCUGUGUCC | 0.4366 | |
| | NO: 300 | | NO: | | NO: 2184 | | | |
| | | | 1242 | | | | | |
| MA0301 | SEQ ID | CCCUGAAACCCUGUGUCCCUA | SEQ ID | GGGACACAGGGUUUCAGGGUG | SEQ ID | CCCUGAAACCCUGUGUCCC | 0.5978 | * |
| | NO: 301 | | NO: | | NO: 2185 | | | |
| | | | 1243 | | | | | |
| MA0302 | SEQ ID | CCUGAAACCCUGUGUCCCUAC | SEQ ID | AGGGACACAGGGUUUCAGGGU | SEQ ID | CCUGAAACCCUGUGUCCCU | 0.4734 | |
| | NO: 302 | | NO: | | NO: 2186 | | | |
| | | | 1244 | | | | | |
| MA0303 | SEQ ID | CUGAAACCCUGUGUCCCUACG | SEQ ID | UAGGGACACAGGGUUUCAGGG | SEQ ID | CUGAAACCCUGUGUCCCUA | 0.2764 | |
| | NO: 303 | | NO: | | NO: 2187 | | | |
| | | | 1245 | | | | | |
| MA0304 | SEQ ID | GAAACCCUGUGUCCCUACGAC | SEQ ID | CGUAGGGACACAGGGUUUCAG | SEQ ID | GAAACCCUGUGUCCCUACG | 0.5062 | * |
| | NO: 304 | | NO: | | NO: 2188 | | | |
| | | | 1246 | | | | | |
| MA0305 | SEQ ID | ACCCUGUGUCCCUACGACUUU | SEQ ID | AGUCGUAGGGACACAGGGUUU | SEQ ID | ACCCUGUGUCCCUACGACU | 0.3557 | |
| | NO: 305 | | NO: | | NO: 2189 | | | |
| | | | 1247 | | | | | |
| MA0306 | SEQ ID | CCCUGUGUCCCUACGACUUUC | SEQ ID | AAGUCGUAGGGACACAGGGUU | SEQ ID | CCCUGUGUCCCUACGACUU | 0.4268 | |
| | NO: 306 | | NO: | | NO: 2190 | | | |
| | | | 1248 | | | | | |
| MA0307 | SEQ ID | CCUGUGUCCCUACGACUUUCU | SEQ ID | AAAGUCGUAGGGACACAGGGU | SEQ ID | CCUGUGUCCCUACGACUUU | 0.3444 | |
| | NO: 307 | | NO: | | NO: 2191 | | | |
| | | | 1249 | | | | | |
| MA0308 | SEQ ID | CUGUGUCCCUACGACUUUCUC | SEQ ID | GAAAGUCGUAGGGACACAGGG | SEQ ID | CUGUGUCCCUACGACUUUC | 0.2530 | |
| | NO: 308 | | NO: | | NO: 2192 | | | |
| | | | 1250 | | | | | |

TABLE 1-8

| double stranded | | | | antisense strand | | | | |
|---|---|---|---|---|---|---|---|---|
| nucleic acid | | sense strand sequence | | sequence | | target MASP2 | relative expression | |
| number | SEQ ID NO: | (5′--->3′) | SEQ ID NO: | (5′--->3′) | SEQ ID NO: | mRNA sequence | level | note |
| MA0309 | SEQ ID | UGUGUCCCUACGACUUUCUCA | SEQ ID | AGAAAGUCGUAGGGACACAGG | SEQ ID | UGUGUCCCUACGACUUUCU | 0.2532 | |
| | NO: 309 | | NO: | | NO: 2193 | | | |
| | | | 1251 | | | | | |
| MA0310 | SEQ ID | GUGUCCCUACGACUUUCUCAA | SEQ ID | GAGAAAGUCGUAGGGACACAG | SEQ ID | GUGUCCCUACGACUUUCUC | 0.4717 | |
| | NO: 310 | | NO: | | NO: 2194 | | | |
| | | | 1252 | | | | | |
| MA0311 | SEQ ID | UGUCCCUACGACUUUCUCAAG | SEQ ID | UGAGAAAGUCGUAGGGACACA | SEQ ID | UGUCCCUACGACUUUCUCA | 0.2522 | |
| | NO: 311 | | NO: | | NO: 2195 | | | |
| | | | 1253 | | | | | |
| MA0312 | SEQ ID | GUCCCUACGACUUUCUCAAGA | SEQ ID | UUGAGAAAGUCGUAGGGACAC | SEQ ID | GUCCCUACGACUUUCUCAA | 0.2807 | |
| | NO: 312 | | NO: | | NO: 2196 | | | |
| | | | 1254 | | | | | |
| MA0313 | SEQ ID | CCCUACGACUUUCUCAAGAUU | SEQ ID | UCUUGAGAAAGUCGUAGGGAC | SEQ ID | CCCUACGACUUUCUCAAGA | 0.4546 | |
| | NO: 313 | | NO: | | NO: 2197 | | | |
| | | | 1255 | | | | | |
| MA0314 | SEQ ID | CUACGACUUUCUCAAGAUUCA | SEQ ID | AAUCUUGAGAAAGUCGUAGGG | SEQ ID | CUACGACUUUCUCAAGAUU | 0.3930 | |
| | NO: 314 | | NO: | | NO: 2198 | | | |
| | | | 1256 | | | | | |
| MA0315 | SEQ ID | ACGACUUUCUCAAGAUUCAAA | SEQ ID | UGAAUCUUGAGAAAGUCGUAG | SEQ ID | ACGACUUUCUCAAGAUUCA | 0.5138 | * |
| | NO: 315 | | NO: | | NO: 2199 | | | |
| | | | 1257 | | | | | |
| MA0316 | SEQ ID | GACUUUCUCAAGAUUCAAACA | SEQ ID | UUUGAAUCUUGAGAAAGUCGU | SEQ ID | GACUUUCUCAAGAUUCAAA | 0.3933 | |
| | NO: 316 | | NO: | | NO: 2200 | | | |
| | | | 1258 | | | | | |
| MA0317 | SEQ ID | ACUUUCUCAAGAUUCAAACAG | SEQ ID | GUUUGAAUCUUGAGAAAGUCG | SEQ ID | ACUUUCUCAAGAUUCAAAC | 0.2619 | |
| | NO: 317 | | NO: | | NO: 2201 | | | |
| | | | 1259 | | | | | |
| MA0318 | SEQ ID | CUUUCUCAAGAUUCAAACAGA | SEQ ID | UGUUUGAAUCUUGAGAAAGUC | SEQ ID | CUUUCUCAAGAUUCAAACA | 0.3187 | |
| | NO: 318 | | NO: | | NO: 2202 | | | |
| | | | 1260 | | | | | |
| MA0319 | SEQ ID | UUCUCAAGAUUCAAACAGACA | SEQ ID | UCUGUUUGAAUCUUGAGAAAG | SEQ ID | UUCUCAAGAUUCAAACAGA | 0.3236 | |
| | NO: 319 | | NO: | | NO: 2203 | | | |
| | | | 1261 | | | | | |
| MA0320 | SEQ ID | UCUCAAGAUUCAAACAGACAG | SEQ ID | GUCUGUUUGAAUCUUGAGAAA | SEQ ID | UCUCAAGAUUCAAACAGAC | 0.5444 | * |
| | NO: 320 | | NO: | | NO: 2204 | | | |
| | | | 1262 | | | | | |
| MA0321 | SEQ ID | CUCAAGAUUCAAACAGACAGA | SEQ ID | UGUCUGUUUGAAUCUUGAGAA | SEQ ID | CUCAAGAUUCAAACAGACA | 0.3206 | |
| | NO: 321 | | NO: | | NO: 2205 | | | |
| | | | 1263 | | | | | |
| MA0322 | SEQ ID | UCAAGAUUCAAACAGACAGAG | SEQ ID | CUGUCUGUUUGAAUCUUGAGA | SEQ ID | UCAAGAUUCAAACAGACAG | 0.5993 | * |
| | NO: 322 | | NO: | | NO: 2206 | | | |
| | | | 1264 | | | | | |
| MA0323 | SEQ ID | CAAGAUUCAAACAGACAGAGA | SEQ ID | UCUGUCUGUUUGAAUCUUGAG | SEQ ID | CAAGAUUCAAACAGACAGA | 0.3521 | |
| | NO: 323 | | NO: | | NO: 2207 | | | |
| | | | 1265 | | | | | |
| MA0324 | SEQ ID | AAGAUUCAAACAGACAGAGAA | SEQ ID | CUCUGUCUGUUUGAAUCUUGA | SEQ ID | AAGAUUCAAACAGACAGAG | 0.5235 | * |
| | NO: 324 | | NO: | | NO: 2208 | | | |
| | | | 1266 | | | | | |
| MA0325 | SEQ ID | AGAUUCAAACAGACAGAGAAG | SEQ ID | UCUCUGUCUGUUUGAAUCUUG | SEQ ID | AGAUUCAAACAGACAGAGA | 0.4590 | * |
| | NO: 325 | | NO: | | NO: 2209 | | | |
| | | | 1267 | | | | | |
| MA0326 | SEQ ID | GAUUCAAACAGACAGAGAAGA | SEQ ID | UUCUCUGUCUGUUUGAAUCUU | SEQ ID | GAUUCAAACAGACAGAGAA | 0.3784 | |
| | NO: 326 | | NO: | | NO: 2210 | | | |
| | | | 1268 | | | | | |
| MA0327 | SEQ ID | CAAACAGACAGAGAAGAACAU | SEQ ID | GUUCUUCUCUGUCUGUUUGAA | SEQ ID | CAAACAGACAGAGAAGAAC | 0.5463 | * |
| | NO: 327 | | NO: | | NO: 2211 | | | |
| | | | 1269 | | | | | |
| MA0328 | SEQ ID | AAACAGACAGAGAAGAACAUG | SEQ ID | UGUUCUUCUCUGUCUGUUUGA | SEQ ID | AAACAGACAGAGAAGAACA | 0.3174 | |
| | NO: 328 | | NO: | | NO: 2212 | | | |
| | | | 1270 | | | | | |
| MA0329 | SEQ ID | AACAGACAGAGAAGAACAUGG | SEQ ID | AUGUUCUUCUCUGUCUGUUUG | SEQ ID | AACAGACAGAGAAGAACAU | 0.3144 | |
| | NO: 329 | | NO: | | NO: 2213 | | | |
| | | | 1271 | | | | | |
| MA0330 | SEQ ID | GACAGAGAAGAACAUGGCCCA | SEQ ID | GGCCAUGUUCUUCUCUGUCUG | SEQ ID | GACAGAGAAGAACAUGGCC | 0.3940 | |
| | NO: 330 | | NO: | | NO: 2214 | | | |
| | | | 1272 | | | | | |
| MA0331 | SEQ ID | CAGAGAAGAACAUGGCCCAUU | SEQ ID | UGGGCCAUGUUCUUCUCUGUC | SEQ ID | CAGAGAAGAACAUGGCCCA | 0.4098 | |
| | NO: 331 | | NO: | | NO: 2215 | | | |
| | | | 1273 | | | | | |
| MA0332 | SEQ ID | AGAAGAACAUGGCCCAUUCUG | SEQ ID | GAAUGGGCCAUGUUCUUCUCU | SEQ ID | AGAAGAACAUGGCCCAUUC | 0.3539 | |
| | NO: 332 | | NO: | | NO: 2216 | | | |
| | | | 1274 | | | | | |
| MA0333 | SEQ ID | GGCCCAUUCUGUGGGAAGACA | SEQ ID | UCUUCCCACAGAAUGGGCCAU | SEQ ID | GGCCCAUUCUGUGGGAAGA | 0.3980 | |
| | NO: 333 | | NO: | | NO: 2217 | | | |
| | | | 1275 | | | | | |
| MA0334 | SEQ ID | GCCCAUUCUGUGGGAAGACAU | SEQ ID | GUCUUCCCACAGAAUGGGCCA | SEQ ID | GCCCAUUCUGUGGGAAGAC | 0.3482 | |
| | NO: 334 | | NO: | | NO: 2218 | | | |
| | | | 1276 | | | | | |
| MA0335 | SEQ ID | CCCAUUCUGUGGGAAGACAUU | SEQ ID | UGUCUUCCCACAGAAUGGGCC | SEQ ID | CCCAUUCUGUGGGAAGACA | 0.3857 | |
| | NO: 335 | | NO: | | NO: 2219 | | | |
| | | | 1277 | | | | | |
| MA0036 | SEQ ID | CCAUUCUGUGGGAAGACAUUG | SEQ ID | AUGUCUUCCCACAGAAUGGGC | SEQ ID | CCAUUCUGUGGGAAGACAU | 0.2614 | |
| | NO: 336 | | NO: | | NO: 2220 | | | |
| | | | 1278 | | | | | |
| MA0337 | SEQ ID | CAUUCUGUGGGAAGACAUUGC | SEQ ID | AAUGUCUUCCCACAGAAUGGG | SEQ ID | CAUUCUGUGGGAAGACAUU | 0.2040 | |
| | NO: 337 | | NO: | | NO: 2221 | | | |
| | | | 1279 | | | | | |
| MA0338 | SEQ ID | GACAUUGCCCCACAGGAUUGA | SEQ ID | AAUCCUGUGGGGCAAUGUCUU | SEQ ID | GACAUUGCCCCACAGGAUU | 0.4934 | * |
| | NO: 338 | | NO: | | NO: 2222 | | | |
| | | | 1280 | | | | | |
| MA0339 | SEQ ID | GCCCCACAGGAUUGAAACAAA | SEQ ID | UGUUUCAAUCCUGUGGGGCAA | SEQ ID | GCCCCACAGGAUUGAAACA | 0.4485 | |
| | NO: 339 | | NO: | | NO: 2223 | | | |
| | | | 1281 | | | | | |
| MA0340 | SEQ ID | CCCACAGGAUUGAAACAAAAA | SEQ ID | UUUGUUUCAAUCCUGUGGGGC | SEQ ID | CCCACAGGAUUGAAACAAA | 0.1891 | |
| | NO: 340 | | NO: | | NO: 2224 | | | |
| | | | 1282 | | | | | |
| MA0341 | SEQ ID | CCACAGGAUUGAAACAAAAAG | SEQ ID | UUUUGUUUCAAUCCUGUGGGG | SEQ ID | CCACAGGAUUGAAACAAAA | 0.2010 | |
| | NO: 341 | | NO: | | NO: 2225 | | | |
| | | | 1283 | | | | | |
| MA0342 | SEQ ID | CACAGGAUUGAAACAAAAAGC | SEQ ID | UUUUUGUUUCAAUCCUGUGGG | SEQ ID | CACAGGAUUGAAACAAAAA | 0.1805 | |
| | NO: 342 | | NO: | | NO: 2226 | | | |
| | | | 1284 | | | | | |
| MA0343 | SEQ ID | ACAGGAUUGAAACAAAAAGCA | SEQ ID | CUUUUUGUUUCAAUCCUGUGG | SEQ ID | ACAGGAUUGAAACAAAAAG | 0.3219 | |
| | NO: 343 | | NO: | | NO: 2227 | | | |
| | | | 1285 | | | | | |
| MA0344 | SEQ ID | GGAUUGAAACAAAAAGCAACA | SEQ ID | UUGCUUUUUGUUUCAAUCCUG | SEQ ID | GGAUUGAAACAAAAAGCAA | 0.2485 | |
| | NO: 344 | | NO: | | NO: 2228 | | | |
| | | | 1286 | | | | | |
| MA0345 | SEQ ID | GAUUGAAACAAAAAGCAACAC | SEQ ID | GUUGCUUUUUGUUUCAAUCCU | SEQ ID | GAUUGAAACAAAAAGCAAC | 0.4567 | |
| | NO: 345 | | NO: | | NO: 2229 | | | |
| | | | 1287 | | | | | |
| MA0346 | SEQ ID | AUUGAAACAAAAAGCAACACG | SEQ ID | UGUUGCUUUUUGUUUCAAUCC | SEQ ID | AUUGAAACAAAAAGCAACA | 0.3183 | |
| | NO: 346 | | NO: | | NO: 2230 | | | |
| | | | 1288 | | | | | |
| MA0347 | SEQ ID | GAAACAAAAAGCAACACGGUG | SEQ ID | CCGUGUUGCUUUUUGUUUCAA | SEQ ID | GAAACAAAAAGCAACACGG | 0.3736 | |
| | NO: 347 | | NO: | | NO: 2231 | | | |
| | | | 1289 | | | | | |
| MA0348 | SEQ ID | AAACAAAAAGCAACACGGUGA | SEQ ID | ACCGUGUUGCUUUUUGUUUCA | SEQ ID | AAACAAAAAGCAACACGGU | 0.3500 | |
| | NO: 348 | | NO: | | NO: 2232 | | | |
| | | | 1290 | | | | | |
| MA0349 | SEQ ID | ACAAAAAGCAACACGGUGACC | SEQ ID | UCACCGUGUUGCUUUUUGUUU | SEQ ID | ACAAAAAGCAACACGGUGA | 0.3531 | |
| | NO: 349 | | NO: | | NO: 2233 | | | |
| | | | 1291 | | | | | |
| MA0350 | SEQ ID | CAAAAAGCAACACGGUGACCA | SEQ ID | GUCACCGUGUUGCUUUUUGUU | SEQ ID | CAAAAAGCAACACGGUGAC | 0.5065 | |
| | NO: 350 | | NO: | | NO: 2234 | | | |
| | | | 1292 | | | | | |
| MA0351 | SEQ ID | AAAAGCAACACGGUGACCAUC | SEQ ID | UGGUCACCGUGUUGCUUUUUG | SEQ ID | AAAAGCAACACGGUGACCA | 0.5195 | |
| | NO: 351 | | NO: | | NO: 2235 | | | |
| | | | 1293 | | | | | |
| MA0352 | SEQ ID | AAAGCAACACGGUGACCAUCA | SEQ ID | AUGGUCACCGUGUUGCUUUUU | SEQ ID | AAAGCAACACGGUGACCAU | 0.5191 | |
| | NO: 352 | | NO: | | NO: 2236 | | | |
| | | | 1294 | | | | | |

TABLE 1-9

| double stranded | | | | antisense strand | | | | |
|---|---|---|---|---|---|---|---|---|
| nucleic acid | | sense strand sequence | | sequence | | target MASP2 | relative expression | |
| number | SEQ ID NO: | (5′--->3′) | SEQ ID NO: | (5′--->3′) | SEQ ID NO: | mRNA sequence | level | note |
| MA0353 | SEQ ID | AAGCAACACGGUGACCAUCAC | SEQ ID | GAUGGUCACCGUGUUGCUUUU | SEQ ID | AAGCAACACGGUGACCAUC | 0.5662 | * |
| | NO: 353 | | NO: | | NO: 2237 | | | |
| | | | 1295 | | | | | |
| MA0354 | SEQ ID | ACACGGUGACCAUCACCUUUG | SEQ ID | AAGGUGAUGGUCACCGUGUUG | SEQ ID | ACACGGUGACCAUCACCUU | 0.3121 | |
| | NO: 354 | | NO: | | NO: 2238 | | | |
| | | | 1296 | | | | | |
| MA0355 | SEQ ID | CACGGUGACCAUCACCUUUGU | SEQ ID | AAAGGUGAUGGUCACCGUGUU | SEQ ID | CACGGUGACCAUCACCUUU | 0.3430 | |
| | NO: 355 | | NO: | | NO: 2239 | | | |
| | | | 1297 | | | | | |
| MA0356 | SEQ ID | ACGGUGACCAUCACCUUUGUC | SEQ ID | CAAAGGUGAUGGUCACCGUGU | SEQ ID | ACGGUGACCAUCACCUUUG | 0.2989 | |
| | NO: 356 | | NO: | | NO: 2240 | | | |
| | | | 1298 | | | | | |
| MA0357 | SEQ ID | CGGUGACCAUCACCUUUGUCA | SEQ ID | ACAAAGGUGAUGGUCACCGUG | SEQ ID | CGGUGACCAUCACCUUUGU | 0.1661 | |
| | NO: 357 | | NO: | | NO: 2241 | | | |
| | | | 1299 | | | | | |
| MA0358 | SEQ ID | GGUGACCAUCACCUUUGUCAC | SEQ ID | GACAAAGGUGAUGGUCACCGU | SEQ ID | GGUGACCAUCACCUUUGUC | 0.5138 | * |
| | NO: 358 | | NO: | | NO: 2242 | | | |
| | | | 1300 | | | | | |
| MA0359 | SEQ ID | GUGACCAUCACCUUUGUCACA | SEQ ID | UGACAAAGGUGAUGGUCACCG | SEQ ID | GUGACCAUCACCUUUGUCA | 0.5498 | * |
| | NO: 359 | | NO: | | NO: 2243 | | | |
| | | | 1301 | | | | | |
| MA0360 | SEQ ID | GACCAUCACCUUUGUCACAGA | SEQ ID | UGUGACAAAGGUGAUGGUCAC | SEQ ID | GACCAUCACCUUUGUCACA | 0.4169 | |
| | NO: 360 | | NO: | | NO: 2244 | | | |
| | | | 1302 | | | | | |
| MA0361 | SEQ ID | ACCAUCACCUUUGUCACAGAU | SEQ ID | CUGUGACAAAGGUGAUGGUCA | SEQ ID | ACCAUCACCUUUGUCACAG | 0.4109 | |
| | NO: 361 | | NO: | | NO: 2245 | | | |
| | | | 1303 | | | | | |
| MA0362 | SEQ ID | CCAUCACCUUUGUCACAGAUG | SEQ ID | UCUGUGACAAAGGUGAUGGUC | SEQ ID | CCAUCACCUUUGUCACAGA | 0.2872 | |
| | NO: 362 | | NO: | | NO: 2246 | | | |
| | | | 1304 | | | | | |
| MA0363 | SEQ ID | CAUCACCUUUGUCACAGAUGA | SEQ ID | AUCUGUGACAAAGGUGAUGGU | SEQ ID | CAUCACCUUUGUCACAGAU | 0.2772 | |
| | NO: 363 | | NO: | | NO: 2247 | | | |
| | | | 1305 | | | | | |
| MA0364 | SEQ ID | UCACCUUUGUCACAGAUGAAU | SEQ ID | UCAUCUGUGACAAAGGUGAUG | SEQ ID | UCACCUUUGUCACAGAUGA | 0.3394 | |
| | NO: 364 | | NO: | | NO: 2248 | | | |
| | | | 1306 | | | | | |
| MA0365 | SEQ ID | ACCUUUGUCACAGAUGAAUCA | SEQ ID | AUUCAUCUGUGACAAAGGUGA | SEQ ID | ACCUUUGUCACAGAUGAAU | 0.4653 | * |
| | NO: 365 | | NO: | | NO: 2249 | | | |
| | | | 1307 | | | | | |
| MA0366 | SEQ ID | CCUUUGUCACAGAUGAAUCAG | SEQ ID | GAUUCAUCUGUGACAAAGGUG | SEQ ID | CCUUUGUCACAGAUGAAUC | 0.5571 | * |
| | NO: 366 | | NO: | | NO: 2250 | | | |
| | | | 1308 | | | | | |
| MA0367 | SEQ ID | CUUUGUCACAGAUGAAUCAGG | SEQ ID | UGAUUCAUCUGUGACAAAGGU | SEQ ID | CUUUGUCACAGAUGAAUCA | 0.5002 | * |
| | NO: 367 | | NO: | | NO: 2251 | | | |
| | | | 1309 | | | | | |
| MA0368 | SEQ ID | UGUCACAGAUGAAUCAGGAGA | SEQ ID | UCCUGAUUCAUCUGUGACAAA | SEQ ID | UGUCACAGAUGAAUCAGGA | 0.3262 | |
| | NO: 368 | | NO: | | NO: 2252 | | | |
| | | | 1310 | | | | | |
| MA0369 | SEQ ID | UCACAGAUGAAUCAGGAGACC | SEQ ID | UCUCCUGAUUCAUCUGUGACA | SEQ ID | UCACAGAUGAAUCAGGAGA | 0.4704 | * |
| | NO: 369 | | NO: | | NO: 2253 | | | |
| | | | 1311 | | | | | |
| MA0370 | SEQ ID | ACAGAUGAAUCAGGAGACCAC | SEQ ID | GGUCUCCUGAUUCAUCUGUGA | SEQ ID | ACAGAUGAAUCAGGAGACC | 0.2196 | |
| | NO: 370 | | NO: | | NO: 2254 | | | |
| | | | 1312 | | | | | |
| MA0371 | SEQ ID | CAGAUGAAUCAGGAGACCACA | SEQ ID | UGGUCUCCUGAUUCAUCUGUG | SEQ ID | CAGAUGAAUCAGGAGACCA | 0.2379 | |
| | NO: 371 | | NO: | | NO: 2255 | | | |
| | | | 1313 | | | | | |
| MA0372 | SEQ ID | AGAUGAAUCAGGAGACCACAC | SEQ ID | GUGGUCUCCUGAUUCAUCUGU | SEQ ID | AGAUGAAUCAGGAGACCAC | 0.2312 | |
| | NO: 372 | | NO: | | NO: 2256 | | | |
| | | | 1314 | | | | | |
| MA0373 | SEQ ID | CAGGAGACCACACAGGCUGGA | SEQ ID | CAGCCUGUGUGGUCUCCUGAU | SEQ ID | CAGGAGACCACACAGGCUG | 0.3972 | |
| | NO: 373 | | NO: | | NO: 2257 | | | |
| | | | 1315 | | | | | |
| MA0374 | SEQ ID | GAGACCACACAGGCUGGAAGA | SEQ ID | UUCCAGCCUGUGUGGUCUCCU | SEQ ID | GAGACCACACAGGCUGGAA | 0.3681 | |
| | NO: 374 | | NO: | | NO: 2258 | | | |
| | | | 1316 | | | | | |
| MA0375 | SEQ ID | AGACCACACAGGCUGGAAGAU | SEQ ID | CUUCCAGCCUGUGUGGUCUCC | SEQ ID | AGACCACACAGGCUGGAAG | 0.1920 | |
| | NO: 375 | | NO: | | NO: 2259 | | | |
| | | | 1317 | | | | | |
| MA0376 | SEQ ID | GACCACACAGGCUGGAAGAUC | SEQ ID | UCUUCCAGCCUGUGUGGUCUC | SEQ ID | GACCACACAGGCUGGAAGA | 0.3744 | |
| | NO: 376 | | NO: | | NO: 2260 | | | |
| | | | 1318 | | | | | |
| MA0377 | SEQ ID | ACCACACAGGCUGGAAGAUCC | SEQ ID | AUCUUCCAGCCUGUGUGGUCU | SEQ ID | ACCACACAGGCUGGAAGAU | 0.0886 | |
| | NO: 377 | | NO: | | NO: 2261 | | | |
| | | | 1319 | | | | | |
| MA0378 | SEQ ID | CACACAGGCUGGAAGAUCCAC | SEQ ID | GGAUCUUCCAGCCUGUGUGGU | SEQ ID | CACACAGGCUGGAAGAUCC | 0.5133 | * |
| | NO: 378 | | NO: | | NO: 2262 | | | |
| | | | 1320 | | | | | |
| MA0379 | SEQ ID | ACAGGCUGGAAGAUCCACUAC | SEQ ID | AGUGGAUCUUCCAGCCUGUGU | SEQ ID | ACAGGCUGGAAGAUCCACU | 0.4863 | |
| | NO: 379 | | NO: | | NO: 2263 | | | |
| | | | 1321 | | | | | |
| MA0380 | SEQ ID | CAGGCUGGAAGAUCCACUACA | SEQ ID | UAGUGGAUCUUCCAGCCUGUG | SEQ ID | CAGGCUGGAAGAUCCACUA | 0.3014 | |
| | NO: 380 | | NO: | | NO: 2264 | | | |
| | | | 1322 | | | | | |
| MA0381 | SEQ ID | AGGCUGGAAGAUCCACUACAC | SEQ ID | GUAGUGGAUCUUCCAGCCUGU | SEQ ID | AGGCUGGAAGAUCCACUAC | 0.5415 | * |
| | NO: 381 | | NO: | | NO: 2265 | | | |
| | | | 1323 | | | | | |
| MA0382 | SEQ ID | GGCUGGAAGAUCCACUACACG | SEQ ID | UGUAGUGGAUCUUCCAGCCUG | SEQ ID | GGCUGGAAGAUCCACUACA | 0.3350 | |
| | NO: 382 | | NO: | | NO: 2266 | | | |
| | | | 1324 | | | | | |
| MA0383 | SEQ ID | GCUGGAAGAUCCACUACACGA | SEQ ID | GUGUAGUGGAUCUUCCAGCCU | SEQ ID | GCUGGAAGAUCCACUACAC | 0.5410 | * |
| | NO: 383 | | NO: | | NO: 2267 | | | |
| | | | 1325 | | | | | |
| MA0384 | SEQ ID | CUGGAAGAUCCACUACACGAG | SEQ ID | CGUGUAGUGGAUCUUCCAGCC | SEQ ID | CUGGAAGAUCCACUACACG | 0.2077 | |
| | NO: 384 | | NO: | | NO: 2268 | | | |
| | | | 1326 | | | | | |
| MA0385 | SEQ ID | UGGAAGAUCCACUACACGAGC | SEQ ID | UCGUGUAGUGGAUCUUCCAGC | SEQ ID | UGGAAGAUCCACUACACGA | 0.3152 | |
| | NO: 385 | | NO: | | NO: 2269 | | | |
| | | | 1327 | | | | | |
| MA0386 | SEQ ID | GGAAGAUCCACUACACGAGCA | SEQ ID | CUCGUGUAGUGGAUCUUCCAG | SEQ ID | GGAAGAUCCACUACACGAG | 0.4167 | |
| | NO: 386 | | NO: | | NO: 2270 | | | |
| | | | 1328 | | | | | |
| MA0387 | SEQ ID | AGAUCCACUACACGAGCACAG | SEQ ID | GUGCUCGUGUAGUGGAUCUUC | SEQ ID | AGAUCCACUACACGAGCAC | 0.4602 | * |
| | NO: 387 | | NO: | | NO: 2271 | | | |
| | | | 1329 | | | | | |
| MA0388 | SEQ ID | GAUCCACUACACGAGCACAGC | SEQ ID | UGUGCUCGUGUAGUGGAUCUU | SEQ ID | GAUCCACUACACGAGCACA | 0.3816 | |
| | NO: 388 | | NO: | | NO: 2272 | | | |
| | | | 1330 | | | | | |
| MA0389 | SEQ ID | CCACUACACGAGCACAGCGCA | SEQ ID | CGCUGUGCUCGUGUAGUGGAU | SEQ ID | CCACUACACGAGCACAGCG | 0.4488 | |
| | NO: 389 | | NO: | | NO: 2273 | | | |
| | | | 1331 | | | | | |
| MA0390 | SEQ ID | ACUACACGAGCACAGCGCAGC | SEQ ID | UGCGCUGUGCUCGUGUAGUGG | SEQ ID | ACUACACGAGCACAGCGCA | 0.5738 | * |
| | NO: 390 | | NO: | | NO: 2274 | | | |
| | | | 1332 | | | | | |
| MA0391 | SEQ ID | CUACACGAGCACAGCGCAGCC | SEQ ID | CUGCGCUGUGCUCGUGUAGUG | SEQ ID | CUACACGAGCACAGCGCAG | 0.3150 | |
| | NO: 391 | | NO: | | NO: 2275 | | | |
| | | | 1333 | | | | | |
| MA0392 | SEQ ID | ACAGCGCAGCCUUGCCCUUAU | SEQ ID | AAGGGCAAGGCUGCGCUGUGC | SEQ ID | ACAGCGCAGCCUUGCCCUU | 0.4304 | |
| | NO: 392 | | NO: | | NO: 2276 | | | |
| | | | 1334 | | | | | |
| MA0393 | SEQ ID | CAGCGCAGCCUUGCCCUUAUC | SEQ ID | UAAGGGCAAGGCUGCGCUGUG | SEQ ID | CAGCGCAGCCUUGCCCUUA | 0.5605 | |
| | NO: 393 | | NO: | | NO: 2277 | | | |
| | | | 1335 | | | | | |
| MA0394 | SEQ ID | AGCGCAGCCUUGCCCUUAUCC | SEQ ID | AUAAGGGCAAGGCUGCGCUGU | SEQ ID | AGCGCAGCCUUGCCCUUAU | 0.4667 | |
| | NO: 394 | | NO: | | NO: 2278 | | | |
| | | | 1336 | | | | | |
| MA0395 | SEQ ID | GCGCAGCCUUGCCCUUAUCCG | SEQ ID | GAUAAGGGCAAGGCUGCGCUG | SEQ ID | GCGCAGCCUUGCCCUUAUC | 0.4770 | * |
| | NO: 395 | | NO: | | NO: 2279 | | | |
| | | | 1337 | | | | | |
| MA0396 | SEQ ID | CAGCCUUGCCCUUAUCCGAUG | SEQ ID | UCGGAUAAGGGCAAGGCUGCG | SEQ ID | CAGCCUUGCCCUUAUCCGA | 0.4466 | |
| | NO: 396 | | NO: | | NO: 2280 | | | |
| | | | 1338 | | | | | |

TABLE 1-10

| double | | | | | | | | |
|---|---|---|---|---|---|---|---|---|
| stranded | | | | | | | relative | |
| nucleic | | | | antisense strand | | | expres- | |
| acid | SEQ ID | sense strand sequence | SEQ ID | sequence | SEQ ID | target MASP2 | sion | |
| number | NO: | (5′--->3′) | NO: | (5′--->3′) | NO: | mRNA sequence | level | note |
| MA0397 | SEQ ID | AGCCUUGCCCUUAUCCGAUGG | SEQ ID | AUCGGAUAAGGGCAAGGCUGC | SEQ ID | AGCCUUGCCCUUAUCCGAU | 0.2460 | |
| | NO: | | NO: | | NO: | | | |
| | 397 | | 1339 | | 2281 | | | |
| MA0398 | SEQ ID | GCCUUGCCCUUAUCCGAUGGC | SEQ ID | CAUCGGAUAAGGGCAAGGCUG | SEQ ID | GCCUUGCCCUUAUCCGAUG | 0.5001 | * |
| | NO: | | NO: | | NO: | | | |
| | 398 | | 1340 | | 2282 | | | |
| MA0399 | SEQ ID | GCCCUUAUCCGAUGGCGCCAC | SEQ ID | GGCGCCAUCGGAUAAGGGCAA | SEQ ID | GCCCUUAUCCGAUGGCGCC | 0.5112 | * |
| | NO: | | NO: | | NO: | | | |
| | 399 | | 1341 | | 2283 | | | |
| MA0400 | SEQ ID | AUCCGAUGGCGCCACCUAAUG | SEQ ID | UUAGGUGGCGCCAUCGGAUAA | SEQ ID | AUCCGAUGGCGCCACCUAA | 0.3946 | |
| | NO: | | NO: | | NO: | | | |
| | 400 | | 1342 | | 2284 | | | |
| MA0401 | SEQ ID | UCCGAUGGCGCCACCUAAUGG | SEQ ID | AUUAGGUGGCGCCAUCGGAUA | SEQ ID | UCCGAUGGCGCCACCUAAU | 0.5387 | |
| | NO: | | NO: | | NO: | | | |
| | 401 | | 1343 | | 2285 | | | |
| MA0402 | SEQ ID | CGAUGGCGCCACCUAAUGGCC | SEQ ID | CCAUUAGGUGGCGCCAUCGGA | SEQ ID | CGAUGGCGCCACCUAAUGG | 0.5710 | * |
| | NO: | | NO: | | NO: | | | |
| | 402 | | 1344 | | 2286 | | | |
| MA0403 | SEQ ID | UGGCGCCACCUAAUGGCCACG | SEQ ID | UGGCCAUUAGGUGGCGCCAUC | SEQ ID | UGGCGCCACCUAAUGGCCA | 0.4455 | |
| | NO: | | NO: | | NO: | | | |
| | 403 | | 1345 | | 2287 | | | |
| MA0404 | SEQ ID | GGCGCCACCUAAUGGCCACGU | SEQ ID | GUGGCCAUUAGGUGGCGCCAU | SEQ ID | GGCGCCACCUAAUGGCCAC | 0.5239 | * |
| | NO: | | NO: | | NO: | | | |
| | 404 | | 1346 | | 2288 | | | |
| MA0405 | SEQ ID | CCACCUAAUGGCCACGUUUCA | SEQ ID | AAACGUGGCCAUUAGGUGGCG | SEQ ID | CCACCUAAUGGCCACGUUU | 0.4512 | |
| | NO: | | NO: | | NO: | | | |
| | 405 | | 1347 | | 2289 | | | |
| MA0406 | SEQ ID | CACCUAAUGGCCACGUUUCAC | SEQ ID | GAAACGUGGCCAUUAGGUGGC | SEQ ID | CACCUAAUGGCCACGUUUC | 0.4201 | |
| | NO: | | NO: | | NO: | | | |
| | 406 | | 1348 | | 2290 | | | |
| MA0407 | SEQ ID | ACCUAAUGGCCACGUUUCACC | SEQ ID | UGAAACGUGGCCAUUAGGUGG | SEQ ID | ACCUAAUGGCCACGUUUCA | 0.3158 | |
| | NO: | | NO: | | NO: | | | |
| | 407 | | 1349 | | 2291 | | | |
| MA0408 | SEQ ID | UAAUGGCCACGUUUCACCUGU | SEQ ID | AGGUGAAACGUGGCCAUUAGG | SEQ ID | UAAUGGCCACGUUUCACCU | 0.4647 | |
| | NO: | | NO: | | NO: | | | |
| | 408 | | 1350 | | 2292 | | | |
| MA0409 | SEQ ID | AUGGCCACGUUUCACCUGUGC | SEQ ID | ACAGGUGAAACGUGGCCAUUA | SEQ ID | AUGGCCACGUUUCACCUGU | 0.2814 | |
| | NO: | | NO: | | NO: | | | |
| | 409 | | 1351 | | 2293 | | | |
| MA0410 | SEQ ID | UGGCCACGUUUCACCUGUGCA | SEQ ID | CACAGGUGAAACGUGGCCAUU | SEQ ID | UGGCCACGUUUCACCUGUG | 0.4897 | * |
| | NO: | | NO: | | NO: | | | |
| | 410 | | 1352 | | 2294 | | | |
| MA0411 | SEQ ID | GGCCACGUUUCACCUGUGCAA | SEQ ID | GCACAGGUGAAACGUGGCCAU | SEQ ID | GGCCACGUUUCACCUGUGC | 0.5642 | * |
| | NO: | | NO: | | NO: | | | |
| | 411 | | 1353 | | 2295 | | | |
| MA0412 | SEQ ID | CACGUUUCACCUGUGCAAGCC | SEQ ID | CUUGCACAGGUGAAACGUGGC | SEQ ID | CACGUUUCACCUGUGCAAG | 0.3378 | |
| | NO: | | NO: | | NO: | | | |
| | 412 | | 1354 | | 2296 | | | |
| MA0413 | SEQ ID | ACGUUUCACCUGUGCAAGCCA | SEQ ID | GCUUGCACAGGUGAAACGUGG | SEQ ID | ACGUUUCACCUGUGCAAGC | 0.3783 | |
| | NO: | | NO: | | NO: | | | |
| | 413 | | 1355 | | 2297 | | | |
| MA0414 | SEQ ID | CGUUUCACCUGUGCAAGCCAA | SEQ ID | GGCUUGCACAGGUGAAACGUG | SEQ ID | CGUUUCACCUGUGCAAGCC | 0.4860 | |
| | NO: | | NO: | | NO: | | | |
| | 414 | | 1356 | | 2298 | | | |
| MA0415 | SEQ ID | UUUCACCUGUGCAAGCCAAAU | SEQ ID | UUGGCUUGCACAGGUGAAACG | SEQ ID | UUUCACCUGUGCAAGCCAA | 0.5422 | * |
| | NO: | | NO: | | NO: | | | |
| | 415 | | 1357 | | 2299 | | | |
| MA0416 | SEQ ID | UUCACCUGUGCAAGCCAAAUA | SEQ ID | UUUGGCUUGCACAGGUGAAAC | SEQ ID | UUCACCUGUGCAAGCCAAA | 0.4283 | |
| | NO: | | NO: | | NO: | | | |
| | 416 | | 1358 | | 2300 | | | |
| MA0417 | SEQ ID | CACCUGUGCAAGCCAAAUACA | SEQ ID | UAUUUGGCUUGCACAGGUGAA | SEQ ID | CACCUGUGCAAGCCAAAUA | 0.2541 | |
| | NO: | | NO: | | NO: | | | |
| | 417 | | 1359 | | 2301 | | | |
| MA0418 | SEQ ID | ACCUGUGCAAGCCAAAUACAU | SEQ ID | GUAUUUGGCUUGCACAGGUGA | SEQ ID | ACCUGUGCAAGCCAAAUAC | 0.3453 | |
| | NO: | | NO: | | NO: | | | |
| | 418 | | 1360 | | 2302 | | | |
| MA0419 | SEQ ID | CCUGUGCAAGCCAAAUACAUC | SEQ ID | UGUAUUUGGCUUGCACAGGUG | SEQ ID | CCUGUGCAAGCCAAAUACA | 0.5007 | |
| | NO: | | NO: | | NO: | | | |
| | 419 | | 1361 | | 2303 | | | |
| MA0420 | SEQ ID | CUGUGCAAGCCAAAUACAUCC | SEQ ID | AUGUAUUUGGCUUGCACAGGU | SEQ ID | CUGUGCAAGCCAAAUACAU | 0.4071 | |
| | NO: | | NO: | | NO: | | | |
| | 420 | | 1362 | | 2304 | | | |
| MA0421 | SEQ ID | UGUGCAAGCCAAAUACAUCCU | SEQ ID | GAUGUAUUUGGCUUGCACAGG | SEQ ID | UGUGCAAGCCAAAUACAUC | 0.3048 | |
| | NO: | | NO: | | NO: | | | |
| | 421 | | 1363 | | 2305 | | | |
| MA0422 | SEQ ID | GUGCAAGCCAAAUACAUCCUG | SEQ ID | GGAUGUAUUUGGCUUGCACAG | SEQ ID | GUGCAAGCCAAAUACAUCC | 0.5079 | * |
| | NO: | | NO: | | NO: | | | |
| | 422 | | 1364 | | 2306 | | | |
| MA0423 | SEQ ID | CAAGCCAAAUACAUCCUGAAA | SEQ ID | UCAGGAUGUAUUUGGCUUGCA | SEQ ID | CAAGCCAAAUACAUCCUGA | 0.5448 | |
| | NO: | | NO: | | NO: | | | |
| | 423 | | 1365 | | 2307 | | | |
| MA0424 | SEQ ID | AAGCCAAAUACAUCCUGAAAG | SEQ ID | UUCAGGAUGUAUUUGGCUUGC | SEQ ID | AAGCCAAAUACAUCCUGAA | 0.1603 | |
| | NO: | | NO: | | NO: | | | |
| | 424 | | 1366 | | 2308 | | | |
| MA0425 | SEQ ID | AGCCAAAUACAUCCUGAAAGA | SEQ ID | UUUCAGGAUGUAUUUGGCUUG | SEQ ID | AGCCAAAUACAUCCUGAAA | 0.3699 | |
| | NO: | | NO: | | NO: | | | |
| | 425 | | 1367 | | 2309 | | | |
| MA0426 | SEQ ID | GCCAAAUACAUCCUGAAAGAC | SEQ ID | CUUUCAGGAUGUAUUUGGCUU | SEQ ID | GCCAAAUACAUCCUGAAAG | 0.4184 | |
| | NO: | | NO: | | NO: | | | |
| | 426 | | 1368 | | 2310 | | | |
| MA0427 | SEQ ID | CCAAAUACAUCCUGAAAGACA | SEQ ID | UCUUUCAGGAUGUAUUUGGCU | SEQ ID | CCAAAUACAUCCUGAAAGA | 0.2512 | |
| | NO: | | NO: | | NO: | | | |
| | 427 | | 1369 | | 2311 | | | |
| MA0428 | SEQ ID | CAAAUACAUCCUGAAAGACAG | SEQ ID | GUCUUUCAGGAUGUAUUUGGC | SEQ ID | CAAAUACAUCCUGAAAGAC | 0.5064 | |
| | NO: | | NO: | | NO: | | | |
| | 428 | | 1370 | | 2312 | | | |
| MA0429 | SEQ ID | AAAUACAUCCUGAAAGACAGC | SEQ ID | UGUCUUUCAGGAUGUAUUUGG | SEQ ID | AAAUACAUCCUGAAAGACA | 0.2717 | |
| | NO: | | NO: | | NO: | | | |
| | 429 | | 1371 | | 2313 | | | |
| MA0430 | SEQ ID | CAUCCUGAAAGACAGCUUCUC | SEQ ID | GAAGCUGUCUUUCAGGAUGUA | SEQ ID | CAUCCUGAAAGACAGCUUC | 0.4665 | |
| | NO: | | NO: | | NO: | | | |
| | 430 | | 1372 | | 2314 | | | |
| MA0431 | SEQ ID | UCCUGAAAGACAGCUUCUCCA | SEQ ID | GAGAAGCUGUCUUUCAGGAUG | SEQ ID | UCCUGAAAGACAGCUUCUC | 0.5761 | * |
| | NO: | | NO: | | NO: | | | |
| | 431 | | 1373 | | 2315 | | | |
| MA0432 | SEQ ID | CUGAAAGACAGCUUCUCCAUC | SEQ ID | UGGAGAAGCUGUCUUUCAGGA | SEQ ID | CUGAAAGACAGCUUCUCCA | 0.5338 | * |
| | NO: | | NO: | | NO: | | | |
| | 432 | | 1374 | | 2316 | | | |
| MA0433 | SEQ ID | UGAAAGACAGCUUCUCCAUCU | SEQ ID | AUGGAGAAGCUGUCUUUCAGG | SEQ ID | UGAAAGACAGCUUCUCCAU | 0.3153 | |
| | NO: | | NO: | | NO: | | | |
| | 433 | | 1375 | | 2317 | | | |
| MA0434 | SEQ ID | GAAAGACAGCUUCUCCAUCUU | SEQ ID | GAUGGAGAAGCUGUCUUUCAG | SEQ ID | GAAAGACAGCUUCUCCAUC | 0.4992 | |
| | NO: | | NO: | | NO: | | | |
| | 434 | | 1376 | | 2318 | | | |
| MA0435 | SEQ ID | AGACAGCUUCUCCAUCUUUUG | SEQ ID | AAAGAUGGAGAAGCUGUCUUU | SEQ ID | AGACAGCUUCUCCAUCUUU | 0.5014 | |
| | NO: | | NO: | | NO: | | | |
| | 435 | | 1377 | | 2319 | | | |
| MA0436 | SEQ ID | GACAGCUUCUCCAUCUUUUGC | SEQ ID | AAAAGAUGGAGAAGCUGUCUU | SEQ ID | GACAGCUUCUCCAUCUUUU | 0.5467 | * |
| | NO: | | NO: | | NO: | | | |
| | 436 | | 1378 | | 2320 | | | |
| MA0437 | SEQ ID | GCUUCUCCAUCUUUUGCGAGA | SEQ ID | UCGCAAAAGAUGGAGAAGCUG | SEQ ID | GCUUCUCCAUCUUUUGCGA | 0.2675 | |
| | NO: | | NO: | | NO: | | | |
| | 437 | | 1379 | 2321 | | | | |
| MA0438 | SEQ ID | CUCCAUCUUUUGCGAGACUGG | SEQ ID | AGUCUCGCAAAAGAUGGAGAA | SEQ ID | CUCCAUCUUUUGCGAGACU | 0.4516 | |
| | NO: | | NO: | | NO: | | | |
| | 438 | | 1380 | | 2322 | | | |
| MA0439 | SEQ ID | CCAUCUUUUGCGAGACUGGCU | SEQ ID | CCAGUCUCGCAAAAGAUGGAG | SEQ ID | CCAUCUUUUGCGAGACUGG | 0.1952 | |
| | NO: | | NO: | | NO: | | | |
| | 439 | | 1381 | 2323 | | | | |
| MA0440 | SEQ ID | CAUCUUUUGCGAGACUGGCUA | SEQ ID | GCCAGUCUCGCAAAAGAUGGA | SEQ ID | CAUCUUUUGCGAGACUGGC | 0.4113 | |
| | NO: | | NO: | | NO: | | | |
| | 440 | | 1382 | | 2324 | | | |

TABLE 1-11

| double | | | | | | | | |
|---|---|---|---|---|---|---|---|---|
| stranded | | | | | | | relative | |
| nucleic | | | | antisense strand | | | expres- | |
| acid | SEQ ID | sense strand sequence | SEQ ID | sequence | SEQ ID | target MASP2 | sion | |
| number | NO: | (5′--->3′) | NO: | (5′--->3′) | NO: | mRNA sequence | level | note |
| MA0441 | SEQ ID | AUCUUUUGCGAGACUGGCUAU | SEQ ID | AGCCAGUCUCGCAAAAGAUGG | SEQ ID | AUCUUUUGCGAGACUGGCU | 0.5191 | * |
| | NO: | | NO: | | NO: | | | |
| | 441 | | 1383 | | 2325 | | | |
| MA0442 | SEQ ID | GCGAGACUGGCUAUGAGCUUC | SEQ ID | AGCUCAUAGCCAGUCUCGCAA | SEQ ID | GCGAGACUGGCUAUGAGCU | 0.4694 | * |
| | NO: | | NO: | | NO: | | | |
| | 442 | | 1384 | | 2326 | | | |
| MA0443 | SEQ ID | CGAGACUGGCUAUGAGCUUCU | SEQ ID | AAGCUCAUAGCCAGUCUCGCA | SEQ ID | CGAGACUGGCUAUGAGCUU | 0.3900 | |
| | NO: | | NO: | | NO: | | | |
| | 443 | | 1385 | | 2327 | | | |
| MA0444 | SEQ ID | AGACUGGCUAUGAGCUUCUGC | SEQ ID | AGAAGCUCAUAGCCAGUCUCG | SEQ ID | AGACUGGCUAUGAGCUUCU | 0.4448 | |
| | NO: | | NO: | | NO: | | | |
| | 444 | | 1386 | | 2328 | | | |
| MA0445 | SEQ ID | CUGGCUAUGAGCUUCUGCAAG | SEQ ID | UGCAGAAGCUCAUAGCCAGUC | SEQ ID | CUGGCUAUGAGCUUCUGCA | 0.3588 | |
| | NO: | | NO: | | NO: | | | |
| | 445 | | 1387 | | 2329 | | | |
| MA0446 | SEQ ID | GGCUAUGAGCUUCUGCAAGGU | SEQ ID | CUUGCAGAAGCUCAUAGCCAG | SEQ ID | GGCUAUGAGCUUCUGCAAG | 0.4931 | * |
| | NO: | | NO: | | NO: | | | |
| | 446 | | 1388 | | 2330 | | | |
| MA0447 | SEQ ID | GCUAUGAGCUUCUGCAAGGUC | SEQ ID | CCUUGCAGAAGCUCAUAGCCA | SEQ ID | GCUAUGAGCUUCUGCAAGG | 0.4732 | * |
| | NO: | | NO: | | NO: | | | |
| | 447 | | 1389 | | 2331 | | | |
| MA0448 | SEQ ID | GAGCUUCUGCAAGGUCACUUG | SEQ ID | AGUGACCUUGCAGAAGCUCAU | SEQ ID | GAGCUUCUGCAAGGUCACU | 0.3265 | |
| | NO: | | NO: | | NO: | | | |
| | 448 | | 1390 | | 2332 | | | |
| MA0449 | SEQ ID | AGCUUCUGCAAGGUCACUUGC | SEQ ID | AAGUGACCUUGCAGAAGCUCA | SEQ ID | AGCUUCUGCAAGGUCACUU | 0.5674 | * |
| | NO: | | NO: | | NO: | | | |
| | 449 | | 1391 | | 2333 | | | |
| MA0450 | SEQ ID | GCAAGGUCACUUGCCCCUGAA | SEQ ID | CAGGGGCAAGUGACCUUGCAG | SEQ ID | GCAAGGUCACUUGCCCCUG | 0.5893 | * |
| | NO: | | NO: | | NO: | | | |
| | 450 | | 1392 | | 2334 | | | |
| MA0451 | SEQ ID | CAAGGUCACUUGCCCCUGAAA | SEQ ID | UCAGGGGCAAGUGACCUUGCA | SEQ ID | CAAGGUCACUUGCCCCUGA | 0.3773 | |
| | NO: | | NO: | | NO: | | | |
| | 451 | | 1393 | | 2335 | | | |
| MA0452 | SEQ ID | AAGGUCACUUGCCCCUGAAAU | SEQ ID | UUCAGGGGCAAGUGACCUUGC | SEQ ID | AAGGUCACUUGCCCCUGAA | 0.4152 | |
| | NO: | | NO: | | NO: | | | |
| | 452 | | 1394 | | 2336 | | | |
| MA0453 | SEQ ID | AGGUCACUUGCCCCUGAAAUC | SEQ ID | UUUCAGGGGCAAGUGACCUUG | SEQ ID | AGGUCACUUGCCCCUGAAA | 0.3239 | |
| | NO: | | NO: | | NO: | | | |
| | 453 | | 1395 | | 2337 | | | |
| MA0454 | SEQ ID | GGUCACUUGCCCCUGAAAUCC | SEQ ID | AUUUCAGGGGCAAGUGACCUU | SEQ ID | GGUCACUUGCCCCUGAAAU | 0.2725 | |
| | NO: | | NO: | | NO: | | | |
| | 454 | | 1396 | | 2338 | | | |
| MA0455 | SEQ ID | GUCACUUGCCCCUGAAAUCCU | SEQ ID | GAUUUCAGGGGCAAGUGACCU | SEQ ID | GUCACUUGCCCCUGAAAUC | 0.2651 | |
| | NO: | | NO: | | NO: | | | |
| | 455 | | 1397 | | 2339 | | | |
| MA0456 | SEQ ID | CUUGCCCCUGAAAUCCUUUAC | SEQ ID | AAAGGAUUUCAGGGGCAAGUG | SEQ ID | CUUGCCCCUGAAAUCCUUU | 0.5417 | |
| | NO: | | NO: | | NO: | | | |
| | 456 | | 1398 | | 2340 | | | |
| MA0457 | SEQ ID | UUGCCCCUGAAAUCCUUUACU | SEQ ID | UAAAGGAUUUCAGGGGCAAGU | SEQ ID | UUGCCCCUGAAAUCCUUUA | 0.5754 | * |
| | NO: | | NO: | | NO: | | | |
| | 457 | | 1399 | | 2341 | | | |
| MA0458 | SEQ ID | UGCCCCUGAAAUCCUUUACUG | SEQ ID | GUAAAGGAUUUCAGGGGCAAG | SEQ ID | UGCCCCUGAAAUCCUUUAC | 0.5572 | * |
| | NO: | | NO: | | NO: | | | |
| | 458 | | 1400 | | 2342 | | | |
| MA0459 | SEQ ID | GCCCCUGAAAUCCUUUACUGC | SEQ ID | AGUAAAGGAUUUCAGGGGCAA | SEQ ID | GCCCCUGAAAUCCUUUACU | 0.3631 | |
| | NO: | | NO: | | NO: | | | |
| | 459 | | 1401 | | 2343 | | | |
| MA0460 | SEQ ID | CCCCUGAAAUCCUUUACUGCA | SEQ ID | CAGUAAAGGAUUUCAGGGGCA | SEQ ID | CCCCUGAAAUCCUUUACUG | 0.1982 | |
| | NO: | | NO: | | NO: | | | |
| | 460 | | 1402 | | 2344 | | | |
| MA0461 | SEQ ID | CCCUGAAAUCCUUUACUGCAG | SEQ ID | GCAGUAAAGGAUUUCAGGGGC | SEQ ID | CCCUGAAAUCCUUUACUGC | 0.3964 | |
| | NO: | | NO: | | NO: | | | |
| | 461 | | 1403 | | 2345 | | | |
| MA0462 | SEQ ID | CCUGAAAUCCUUUACUGCAGU | SEQ ID | UGCAGUAAAGGAUUUCAGGGG | SEQ ID | CCUGAAAUCCUUUACUGCA | 0.4854 | |
| | NO: | | NO: | | NO: | | | |
| | 462 | | 1404 | | 2346 | | | |
| MA0463 | SEQ ID | GAAAUCCUUUACUGCAGUUUG | SEQ ID | AACUGCAGUAAAGGAUUUCAG | SEQ ID | GAAAUCCUUUACUGCAGUU | 0.2896 | |
| | NO: | | NO: | | NO: | | | |
| | 463 | | 1405 | | 2347 | | | |
| MA0464 | SEQ ID | AAAUCCUUUACUGCAGUUUGU | SEQ ID | AAACUGCAGUAAAGGAUUUCA | SEQ ID | AAAUCCUUUACUGCAGUUU | 0.4440 | |
| | NO: | | NO: | | NO: | | | |
| | 464 | | 1406 | | 2348 | | | |
| MA0465 | SEQ ID | AUCCUUUACUGCAGUUUGUCA | SEQ ID | ACAAACUGCAGUAAAGGAUUU | SEQ ID | AUCCUUUACUGCAGUUUGU | 0.3501 | |
| | NO: | | NO: | | NO: | | | |
| | 465 | | 1407 | | 2349 | | | |
| MA0466 | SEQ ID | UCCUUUACUGCAGUUUGUCAG | SEQ ID | GACAAACUGCAGUAAAGGAUU | SEQ ID | UCCUUUACUGCAGUUUGUC | 0.5265 | * |
| | NO: | | NO: | | NO: | | | |
| | 466 | | 1408 | | 2350 | | | |
| MA0467 | SEQ ID | CCUUUACUGCAGUUUGUCAGA | SEQ ID | UGACAAACUGCAGUAAAGGAU | SEQ ID | CCUUUACUGCAGUUUGUCA | 0.3027 | |
| | NO: | | NO: | | NO: | | | |
| | 467 | | 1409 | | 2351 | | | |
| MA0468 | SEQ ID | CUUUACUGCAGUUUGUCAGAA | SEQ ID | CUGACAAACUGCAGUAAAGGA | SEQ ID | CUUUACUGCAGUUUGUCAG | 0.4220 | |
| | NO: | | NO: | | NO: | | | |
| | 468 | | 1410 | | 2352 | | | |
| MA0469 | SEQ ID | UACUGCAGUUUGUCAGAAAGA | SEQ ID | UUUCUGACAAACUGCAGUAAA | SEQ ID | UACUGCAGUUUGUCAGAAA | 0.4121 | |
| | NO: | | NO: | | NO: | | | |
| | 469 | | 1411 | | 2353 | | | |
| MA0470 | SEQ ID | ACUGCAGUUUGUCAGAAAGAU | SEQ ID | CUUUCUGACAAACUGCAGUAA | SEQ ID | ACUGCAGUUUGUCAGAAAG | 0.4037 | |
| | NO: | | NO: | | NO: | | | |
| | 470 | | 1412 | | 2354 | | | |
| MA0471 | SEQ ID | CUGCAGUUUGUCAGAAAGAUG | SEQ ID | UCUUUCUGACAAACUGCAGUA | SEQ ID | CUGCAGUUUGUCAGAAAGA | 0.2964 | |
| | NO: | | NO: | | NO: | | | |
| | 471 | | 1413 | | 2355 | | | |
| MA0472 | SEQ ID | UGCAGUUUGUCAGAAAGAUGG | SEQ ID | AUCUUUCUGACAAACUGCAGU | SEQ ID | UGCAGUUUGUCAGAAAGAU | 0.3959 | |
| | NO: | | NO: | | NO: | | | |
| | 472 | | 1414 | | 2356 | | | |
| MA0473 | SEQ ID | CAGUUUGUCAGAAAGAUGGAU | SEQ ID | CCAUCUUUCUGACAAACUGCA | SEQ ID | CAGUUUGUCAGAAAGAUGG | 0.4549 | |
| | NO: | | NO: | | NO: | | | |
| | 473 | | 1415 | | 2357 | | | |
| MA0474 | SEQ ID | GUUUGUCAGAAAGAUGGAUCU | SEQ ID | AUCCAUCUUUCUGACAAACUG | SEQ ID | GUUUGUCAGAAAGAUGGAU | 0.3267 | |
| | NO: | | NO: | | NO: | | | |
| | 474 | | 1416 | | 2358 | | | |
| MA0475 | SEQ ID | UUGUCAGAAAGAUGGAUCUUG | SEQ ID | AGAUCCAUCUUUCUGACAAAC | SEQ ID | UUGUCAGAAAGAUGGAUCU | 0.4131 | |
| | NO: | | NO: | | NO: | | | |
| | 475 | | 1417 | | 2359 | | | |
| MA0476 | SEQ ID | CAGAAAGAUGGAUCUUGGGAC | SEQ ID | CCCAAGAUCCAUCUUUCUGAC | SEQ ID | CAGAAAGAUGGAUCUUGGG | 0.5620 | * |
| | NO: | | NO: | | NO: | | | |
| | 476 | | 1418 | | 2360 | | | |
| MA0477 | SEQ ID | AGAAAGAUGGAUCUUGGGACC | SEQ ID | UCCCAAGAUCCAUCUUUCUGA | SEQ ID | AGAAAGAUGGAUCUUGGGA | 0.4532 | |
| | NO: | | NO: | | NO: | | | |
| | 477 | | 1419 | | 2361 | | | |
| MA0478 | SEQ ID | GAAAGAUGGAUCUUGGGACCG | SEQ ID | GUCCCAAGAUCCAUCUUUCUG | SEQ ID | GAAAGAUGGAUCUUGGGAC | 0.5746 | * |
| | NO: | | NO: | | NO: | | | |
| | 478 | | 1420 | | 2362 | | | |
| MA0479 | SEQ ID | AGAUGGAUCUUGGGACCGGCC | SEQ ID | CCGGUCCCAAGAUCCAUCUUU | SEQ ID | AGAUGGAUCUUGGGACCGG | 0.4889 | * |
| | NO: | | NO: | | NO: | | | |
| | 479 | | 1421 | | 2363 | | | |
| MA0480 | SEQ ID | GAUGGAUCUUGGGACCGGCCA | SEQ ID | GCCGGUCCCAAGAUCCAUCUU | SEQ ID | GAUGGAUCUUGGGACCGGC | 0.4425 | |
| | NO: | | NO: | | NO: | | | |
| | 480 | | 1422 | | 2364 | | | |
| MA0481 | SEQ ID | CCAAUGCCCGCGUGCAGCAUU | SEQ ID | UGCUGCACGCGGGCAUUGGCC | SEQ ID | CCAAUGCCCGCGUGCAGCA | 0.1766 | |
| | NO: | | NO: | | NO: | | | |
| | 481 | | 1423 | | 2365 | | | |
| MA0482 | SEQ ID | CAAUGCCCGCGUGCAGCAUUG | SEQ ID | AUGCUGCACGCGGGCAUUGGC | SEQ ID | CAAUGCCCGCGUGCAGCAU | 0.1303 | |
| | NO: | | NO: | | NO: | | | |
| | 482 | | 1424 | | 2366 | | | |
| MA0483 | SEQ ID | AAUGCCCGCGUGCAGCAUUGU | SEQ ID | AAUGCUGCACGCGGGCAUUGG | SEQ ID | AAUGCCCGCGUGCAGCAUU | 0.3310 | |
| | NO: | | NO: | | NO: | | | |
| | 483 | | 1425 | | 2367 | | | |
| MA0484 | SEQ ID | CCCGCGUGCAGCAUUGUUGAC | SEQ ID | CAACAAUGCUGCACGCGGGCA | SEQ ID | CCCGCGUGCAGCAUUGUUG | 0.4186 | |
| | NO: | | NO: | | NO: | | | |
| | 484 | | 1426 | | 2368 | | | |

TABLE 1-12

| double | | | | | | | | |
|---|---|---|---|---|---|---|---|---|
| stranded | | | | | | | relative | |
| nucleic | | | | antisense strand | | | expres- | |
| acid | SEQ ID | sense strand sequence | SEQ ID | sequence | SEQ ID | target MASP2 | sion | |
| number | NO: | (5′--->3′) | NO: | (5′--->3′) | NO: | mRNA sequence | level | note |
| MA0485 | SEQ ID | CCGCGUGCAGCAUUGUUGACU | SEQ ID | UCAACAAUGCUGCACGCGGGC | SEQ ID | CCGCGUGCAGCAUUGUUGA | 0.4219 | |
| | NO: | | NO: | | NO: | | | |
| | 485 | | 1427 | | 2369 | | | |
| MA0486 | SEQ ID | CGUGCAGCAUUGUUGACUGUG | SEQ ID | CAGUCAACAAUGCUGCACGCG | SEQ ID | CGUGCAGCAUUGUUGACUG | 0.3188 | |
| | NO: | | NO: | | NO: | | | |
| | 486 | | 1428 | | 2370 | | | |
| MA0487 | SEQ ID | GUGCAGCAUUGUUGACUGUGG | SEQ ID | ACAGUCAACAAUGCUGCACGC | SEQ ID | GUGCAGCAUUGUUGACUGU | 0.4787 | |
| | NO: | | NO: | | NO: | | | |
| | 487 | | 1429 | | 2371 | | | |
| MA0488 | SEQ ID | GCAGCAUUGUUGACUGUGGCC | SEQ ID | CCACAGUCAACAAUGCUGCAC | SEQ ID | GCAGCAUUGUUGACUGUGG | 0.5918 | * |
| | NO: | | NO: | | NO: | | | |
| | 488 | | 1430 | | 2372 | | | |
| MA0489 | SEQ ID | GCAUUGUUGACUGUGGCCCUC | SEQ ID | GGGCCACAGUCAACAAUGCUG | SEQ ID | GCAUUGUUGACUGUGGCCC | 0.5045 | * |
| | NO: | | NO: | | NO: | | | |
| | 489 | | 1431 | | 2373 | | | |
| MA0490 | SEQ ID | CAUUGUUGACUGUGGCCCUCC | SEQ ID | AGGGCCACAGUCAACAAUGCU | SEQ ID | CAUUGUUGACUGUGGCCCU | 0.4851 | |
| | NO: | | NO: | | NO: | | | |
| | 490 | | 1432 | | 2374 | | | |
| MA0491 | SEQ ID | AUUGUUGACUGUGGCCCUCCU | SEQ ID | GAGGGCCACAGUCAACAAUGC | SEQ ID | AUUGUUGACUGUGGCCCUC | 0.5925 | * |
| | NO: | | NO: | | NO: | | | |
| | 491 | | 1433 | | 2375 | | | |
| MA0492 | SEQ ID | UGACUGUGGCCCUCCUGAUGA | SEQ ID | AUCAGGAGGGCCACAGUCAAC | SEQ ID | UGACUGUGGCCCUCCUGAU | 0.3410 | |
| | NO: | | NO: | | NO: | | | |
| | 492 | | 1434 | | 2376 | | | |
| MA0493 | SEQ ID | GACUGUGGCCCUCCUGAUGAU | SEQ ID | CAUCAGGAGGGCCACAGUCAA | SEQ ID | GACUGUGGCCCUCCUGAUG | 0.3529 | |
| | NO: | | NO: | | NO: | | | |
| | 493 | | 1435 | | 2377 | | | |
| MA0494 | SEQ ID | ACUGUGGCCCUCCUGAUGAUC | SEQ ID | UCAUCAGGAGGGCCACAGUCA | SEQ ID | ACUGUGGCCCUCCUGAUGA | 0.2114 | |
| | NO: | | NO: | | NO: | | | |
| | 494 | | 1436 | | 2378 | | | |
| MA0495 | SEQ ID | CUGUGGCCCUCCUGAUGAUCU | SEQ ID | AUCAUCAGGAGGGCCACAGUC | SEQ ID | CUGUGGCCCUCCUGAUGAU | 0.2853 | |
| | NO: | | NO: | | NO: | | | |
| | 495 | | 1437 | | 2379 | | | |
| MA0496 | SEQ ID | UGGCCCUCCUGAUGAUCUACC | SEQ ID | UAGAUCAUCAGGAGGGCCACA | SEQ ID | UGGCCCUCCUGAUGAUCUA | 0.3154 | |
| | NO: | | NO: | | NO: | | | |
| | 496 | | 1438 | | 2380 | | | |
| MA0497 | SEQ ID | GCCCUCCUGAUGAUCUACCCA | SEQ ID | GGUAGAUCAUCAGGAGGGCCA | SEQ ID | GCCCUCCUGAUGAUCUACC | 0.5766 | * |
| | NO: | | NO: | | NO: | | | |
| | 497 | | 1439 | | 2381 | | | |
| MA0498 | SEQ ID | CCUCCUGAUGAUCUACCCAGU | SEQ ID | UGGGUAGAUCAUCAGGAGGGC | SEQ ID | CCUCCUGAUGAUCUACCCA | 0.4269 | |
| | NO: | | NO: | | NO: | | | |
| | 498 | | 1440 | | 2382 | | | |
| MA0499 | SEQ ID | UCCUGAUGAUCUACCCAGUGG | SEQ ID | ACUGGGUAGAUCAUCAGGAGG | SEQ ID | UCCUGAUGAUCUACCCAGU | 0.5275 | * |
| | NO: | | NO: | | NO: | | | |
| | 499 | | 1441 | | 2383 | | | |
| MA0500 | SEQ ID | CCUGAUGAUCUACCCAGUGGC | SEQ ID | CACUGGGUAGAUCAUCAGGAG | SEQ ID | CCUGAUGAUCUACCCAGUG | 0.5850 | * |
| | NO: | | NO: | | NO: | | | |
| | 500 | | 1442 | | 2384 | | | |
| MA0501 | SEQ ID | CUGAUGAUCUACCCAGUGGCC | SEQ ID | CCACUGGGUAGAUCAUCAGGA | SEQ ID | CUGAUGAUCUACCCAGUGG | 0.4049 | |
| | NO: | | NO: | | NO: | | | |
| | 501 | | 1443 | | 2385 | | | |
| MA0502 | SEQ ID | UACCCAGUGGCCGAGUGGAGU | SEQ ID | UCCACUCGGCCACUGGGUAGA | SEQ ID | UACCCAGUGGCCGAGUGGA | 0.5202 | |
| | NO: | | NO: | | NO: | | | |
| | 502 | | 1444 | | 2386 | | | |
| MA0503 | SEQ ID | ACCCAGUGGCCGAGUGGAGUA | SEQ ID | CUCCACUCGGCCACUGGGUAG | SEQ ID | ACCCAGUGGCCGAGUGGAG | 0.5126 | * |
| | NO: | | NO: | | NO: | | | |
| | 503 | | 1445 | | 2387 | | | |
| MA0504 | SEQ ID | CCCAGUGGCCGAGUGGAGUAC | SEQ ID | ACUCCACUCGGCCACUGGGUA | SEQ ID | CCCAGUGGCCGAGUGGAGU | 0.2501 | |
| | NO: | | NO: | | NO: | | | |
| | 504 | | 1446 | | 2388 | | | |
| MA0505 | SEQ ID | CCAGUGGCCGAGUGGAGUACA | SEQ ID | UACUCCACUCGGCCACUGGGU | SEQ ID | CCAGUGGCCGAGUGGAGUA | 0.4064 | |
| | NO: | | NO: | | NO: | | | |
| | 505 | | 1447 | | 2389 | | | |
| MA0506 | SEQ ID | GUGGCCGAGUGGAGUACAUCA | SEQ ID | AUGUACUCCACUCGGCCACUG | SEQ ID | GUGGCCGAGUGGAGUACAU | 0.2857 | |
| | NO: | | NO: | | NO: | | | |
| | 506 | | 1448 | | 2390 | | | |
| MA0507 | SEQ ID | GGCCGAGUGGAGUACAUCACA | SEQ ID | UGAUGUACUCCACUCGGCCAC | SEQ ID | GGCCGAGUGGAGUACAUCA | 0.2613 | |
| | NO: | | NO: | | NO: | | | |
| | 507 | | 1449 | | 2391 | | | |
| MA0508 | SEQ ID | GCCGAGUGGAGUACAUCACAG | SEQ ID | GUGAUGUACUCCACUCGGCCA | SEQ ID | GCCGAGUGGAGUACAUCAC | 0.2870 | |
| | NO: | | NO: | | NO: | | | |
| | 508 | | 1450 | | 2392 | | | |
| MA0509 | SEQ ID | CCGAGUGGAGUACAUCACAGG | SEQ ID | UGUGAUGUACUCCACUCGGCC | SEQ ID | CCGAGUGGAGUACAUCACA | 0.4004 | |
| | NO: | | NO: | | NO: | | | |
| | 509 | | 1451 | | 2393 | | | |
| MA0510 | SEQ ID | CGAGUGGAGUACAUCACAGGU | SEQ ID | CUGUGAUGUACUCCACUCGGC | SEQ ID | CGAGUGGAGUACAUCACAG | 0.4004 | |
| | NO: | | NO: | | NO: | | | |
| | 510 | | 1452 | | 2394 | | | |
| MA0511 | SEQ ID | GAGUGGAGUACAUCACAGGUC | SEQ ID | CCUGUGAUGUACUCCACUCGG | SEQ ID | GAGUGGAGUACAUCACAGG | 0.5938 | * |
| | NO: | | NO: | | NO: | | | |
| | 511 | | 1453 | | 2395 | | | |
| MA0512 | SEQ ID | AGUGGAGUACAUCACAGGUCC | SEQ ID | ACCUGUGAUGUACUCCACUCG | SEQ ID | AGUGGAGUACAUCACAGGU | 0.4559 | |
| | NO: | | NO: | | NO: | | | |
| | 512 | | 1454 | | 2396 | | | |
| MA0513 | SEQ ID | GUGGAGUACAUCACAGGUCCU | SEQ ID | GACCUGUGAUGUACUCCACUC | SEQ ID | GUGGAGUACAUCACAGGUC | 0.5007 | * |
| | NO: | | NO: | | NO: | | | |
| | 513 | | 1455 | | 2397 | | | |
| MA0514 | SEQ ID | GGAGUACAUCACAGGUCCUGG | SEQ ID | AGGACCUGUGAUGUACUCCAC | SEQ ID | GGAGUACAUCACAGGUCCU | 0.4028 | |
| | NO: | | NO: | | NO: | | | |
| | 514 | | 1456 | | 2398 | | | |
| MA0515 | SEQ ID | GAGUACAUCACAGGUCCUGGA | SEQ ID | CAGGACCUGUGAUGUACUCCA | SEQ ID | GAGUACAUCACAGGUCCUG | 0.3880 | |
| | NO: | | NO: | | NO: | | | |
| | 515 | | 1457 | | 2399 | | | |
| MA0516 | SEQ ID | GUACAUCACAGGUCCUGGAGU | SEQ ID | UCCAGGACCUGUGAUGUACUC | SEQ ID | GUACAUCACAGGUCCUGGA | 0.3831 | |
| | NO: | | NO: | | NO: | | | |
| | 516 | | 1458 | | 2400 | | | |
| MA0517 | SEQ ID | CACAGGUCCUGGAGUGACCAC | SEQ ID | GGUCACUCCAGGACCUGUGAU | SEQ ID | CACAGGUCCUGGAGUGACC | 0.4413 | * |
| | NO: | | NO: | | NO: | | | |
| | 517 | | 1459 | | 2401 | | | |
| MA0518 | SEQ ID | ACAGGUCCUGGAGUGACCACC | SEQ ID | UGGUCACUCCAGGACCUGUGA | SEQ ID | ACAGGUCCUGGAGUGACCA | 0.3835 | |
| | NO: | | NO: | | NO: | | | |
| | 518 | | 1460 | | 2402 | | | |
| MA0519 | SEQ ID | CCUGGAGUGACCACCUACAAA | SEQ ID | UGUAGGUGGUCACUCCAGGAC | SEQ ID | CCUGGAGUGACCACCUACA | 0.5596 | * |
| | NO: | | NO: | | NO: | | | |
| | 519 | | 1461 | | 2403 | | | |
| MA0520 | SEQ ID | UGGAGUGACCACCUACAAAGC | SEQ ID | UUUGUAGGUGGUCACUCCAGG | SEQ ID | UGGAGUGACCACCUACAAA | 0.4134 | |
| | NO: | | NO: | | NO: | | | |
| | 520 | | 1462 | | 2404 | | | |
| MA0521 | SEQ ID | GGAGUGACCACCUACAAAGCU | SEQ ID | CUUUGUAGGUGGUCACUCCAG | SEQ ID | GGAGUGACCACCUACAAAG | 0.3734 | |
| | NO: | | NO: | | NO: | | | |
| | 521 | | 1463 | | 2405 | | | |
| MA0522 | SEQ ID | GAGUGACCACCUACAAAGCUG | SEQ ID | GCUUUGUAGGUGGUCACUCCA | SEQ ID | GAGUGACCACCUACAAAGC | 0.5727 | * |
| | NO: | | NO: | | NO: | | | |
| | 522 | | 1464 | | 2406 | | | |
| MA0523 | SEQ ID | AGUGACCACCUACAAAGCUGU | SEQ ID | AGCUUUGUAGGUGGUCACUCC | SEQ ID | AGUGACCACCUACAAAGCU | 0.3071 | |
| | NO: | | NO: | | NO: | | | |
| | 523 | | 1465 | | 2407 | | | |
| MA0524 | SEQ ID | UGACCACCUACAAAGCUGUGA | SEQ ID | ACAGCUUUGUAGGUGGUCACU | SEQ ID | UGACCACCUACAAAGCUGU | 0.3420 | |
| | NO: | | NO: | | NO: | | | |
| | 524 | | 1466 | | 2408 | | | |
| MA0525 | SEQ ID | CACCUACAAAGCUGUGAUUCA | SEQ ID | AAUCACAGCUUUGUAGGUGGU | SEQ ID | CACCUACAAAGCUGUGAUU | 0.5218 | * |
| | NO: | | NO: | | NO: | | | |
| | 525 | | 1467 | | 2409 | | | |
| MA0526 | SEQ ID | CCUACAAAGCUGUGAUUCAGU | SEQ ID | UGAAUCACAGCUUUGUAGGUG | SEQ ID | CCUACAAAGCUGUGAUUCA | 0.2914 | |
| | NO: | | NO: | | NO: | | | |
| | 526 | | 1468 | | 2410 | | | |
| MA0527 | SEQ ID | CUACAAAGCUGUGAUUCAGUA | SEQ ID | CUGAAUCACAGCUUUGUAGGU | SEQ ID | CUACAAAGCUGUGAUUCAG | 0.5212 | * |
| | NO: | | NO: | | NO: | | | |
| | 527 | | 1469 | | 2411 | | | |
| MA0528 | SEQ ID | ACAAAGCUGUGAUUCAGUACA | SEQ ID | UACUGAAUCACAGCUUUGUAG | SEQ ID | ACAAAGCUGUGAUUCAGUA | 0.2584 | |
| | NO: | | NO: | | NO: | | | |
| | 528 | | 1470 | | 2412 | | | |

TABLE 1-13

| double | | | | | | | | |
|---|---|---|---|---|---|---|---|---|
| stranded | | | | | | | relative | |
| nucleic | | | | antisense strand | | | expres- | |
| acid | SEQ ID | sense strand sequence | SEQ ID | sequence | SEQ ID | target MASP2 | sion | |
| number | NO: | (5′--->3′) | NO: | (5′--->3′) | NO: | mRNA sequence | level | note |
| MA0529 | SEQ ID | CAAAGCUGUGAUUCAGUACAG | SEQ ID | GUACUGAAUCACAGCUUUGUA | SEQ ID | CAAAGCUGUGAUUCAGUAC | 0.3258 | |
| | NO: | | NO: | | NO: | | | |
| | 529 | | 1471 | | 2413 | | | |
| MA0530 | SEQ ID | AAAGCUGUGAUUCAGUACAGC | SEQ ID | UGUACUGAAUCACAGCUUUGU | SEQ ID | AAAGCUGUGAUUCAGUACA | 0.2658 | |
| | NO: | | NO: | | NO: | | | |
| | 530 | | 1472 | | 2414 | | | |
| MA0531 | SEQ ID | AGCUGUGAUUCAGUACAGCUG | SEQ ID | GCUGUACUGAAUCACAGCUUU | SEQ ID | AGCUGUGAUUCAGUACAGC | 0.4886 | * |
| | NO: | | NO: | | NO: | | | |
| | 531 | | 1473 | | 2415 | | | |
| MA0532 | SEQ ID | GAUUCAGUACAGCUGUGAAGA | SEQ ID | UUCACAGCUGUACUGAAUCAC | SEQ ID | GAUUCAGUACAGCUGUGAA | 0.4636 | |
| | NO: | | NO: | | NO: | | | |
| | 532 | | 1474 | | 2416 | | | |
| MA0533 | SEQ ID | UUCAGUACAGCUGUGAAGAGA | SEQ ID | UCUUCACAGCUGUACUGAAUC | SEQ ID | UUCAGUACAGCUGUGAAGA | 0.4362 | |
| | NO: | | NO: | | NO: | | | |
| | 533 | | 1475 | | 2417 | | | |
| MA0534 | SEQ ID | UCAGUACAGCUGUGAAGAGAC | SEQ ID | CUCUUCACAGCUGUACUGAAU | SEQ ID | UCAGUACAGCUGUGAAGAG | 0.2338 | |
| | NO: | | NO: | | NO: | | | |
| | 534 | | 1476 | | 2418 | | | |
| MA0535 | SEQ ID | CAGUACAGCUGUGAAGAGACC | SEQ ID | UCUCUUCACAGCUGUACUGAA | SEQ ID | CAGUACAGCUGUGAAGAGA | 0.3281 | |
| | NO: | | NO: | | NO: | | | |
| | 535 | | 1477 | | 2419 | | | |
| MA0536 | SEQ ID | GUACAGCUGUGAAGAGACCUU | SEQ ID | GGUCUCUUCACAGCUGUACUG | SEQ ID | GUACAGCUGUGAAGAGACC | 0.2368 | |
| | NO: | | NO: | | NO: | | | |
| | 536 | | 1478 | | 2420 | | | |
| MA0537 | SEQ ID | ACAGCUGUGAAGAGACCUUCU | SEQ ID | AAGGUCUCUUCACAGCUGUAC | SEQ ID | ACAGCUGUGAAGAGACCUU | 0.3683 | |
| | NO: | | NO: | | NO: | | | |
| | 537 | | 1479 | | 2421 | | | |
| MA0538 | SEQ ID | CAGCUGUGAAGAGACCUUCUA | SEQ ID | GAAGGUCUCUUCACAGCUGUA | SEQ ID | CAGCUGUGAAGAGACCUUC | 0.3346 | |
| | NO: | | NO: | | NO: | | | |
| | 538 | | 1480 | | 2422 | | | |
| MA0539 | SEQ ID | AGCUGUGAAGAGACCUUCUAC | SEQ ID | AGAAGGUCUCUUCACAGCUGU | SEQ ID | AGCUGUGAAGAGACCUUCU | 0.4532 | * |
| | NO: | | NO: | | NO: | | | |
| | 539 | | 1481 | | 2423 | | | |
| MA0540 | SEQ ID | UGUGAAGAGACCUUCUACACA | SEQ ID | UGUAGAAGGUCUCUUCACAGC | SEQ ID | UGUGAAGAGACCUUCUACA | 0.2455 | |
| | NO: | | NO: | | NO: | | | |
| | 540 | | 1482 | | 2424 | | | |
| MA0541 | SEQ ID | GUGAAGAGACCUUCUACACAA | SEQ ID | GUGUAGAAGGUCUCUUCACAG | SEQ ID | GUGAAGAGACCUUCUACAC | 0.1206 | |
| | NO: | | NO: | | NO: | | | |
| | 541 | | 1483 | | 2425 | | | |
| MA0542 | SEQ ID | UGAAGAGACCUUCUACACAAU | SEQ ID | UGUGUAGAAGGUCUCUUCACA | SEQ ID | UGAAGAGACCUUCUACACA | 0.4039 | |
| | NO: | | NO: | | NO: | | | |
| | 542 | | 1484 | | 2426 | | | |
| MA0543 | SEQ ID | GAAGAGACCUUCUACACAAUG | SEQ ID | UUGUGUAGAAGGUCUCUUCAC | SEQ ID | GAAGAGACCUUCUACACAA | 0.0873 | |
| | NO: | | NO: | | NO: | | | |
| | 543 | | 1485 | | 2427 | | | |
| MA0544 | SEQ ID | AAGAGACCUUCUACACAAUGA | SEQ ID | AUUGUGUAGAAGGUCUCUUCA | SEQ ID | AAGAGACCUUCUACACAAU | 0.3674 | |
| | NO: | | NO: | | NO: | | | |
| | 544 | | 1486 | | 2428 | | | |
| MA0545 | SEQ ID | AGAGACCUUCUACACAAUGAA | SEQ ID | CAUUGUGUAGAAGGUCUCUUC | SEQ ID | AGAGACCUUCUACACAAUG | 0.5259 | |
| | NO: | | NO: | | NO: | | | |
| | 545 | | 1487 | | 2429 | | | |
| MA0546 | SEQ ID | GAGACCUUCUACACAAUGAAA | SEQ ID | UCAUUGUGUAGAAGGUCUCUU | SEQ ID | GAGACCUUCUACACAAUGA | 0.4628 | |
| | NO: | | NO: | | NO: | | | |
| | 546 | | 1488 | | 2430 | | | |
| MA0547 | SEQ ID | AGACCUUCUACACAAUGAAAG | SEQ ID | UUCAUUGUGUAGAAGGUCUCU | SEQ ID | AGACCUUCUACACAAUGAA | 0.2071 | |
| | NO: | | NO: | | NO: | | | |
| | 547 | | 1489 | | 2431 | | | |
| MA0548 | SEQ ID | GACCUUCUACACAAUGAAAGU | SEQ ID | UUUCAUUGUGUAGAAGGUCUC | SEQ ID | GACCUUCUACACAAUGAAA | 0.3355 | |
| | NO: | | NO: | | NO: | | | |
| | 548 | | 1490 | | 2432 | | | |
| MA0549 | SEQ ID | ACCUUCUACACAAUGAAAGUG | SEQ ID | CUUUCAUUGUGUAGAAGGUCU | SEQ ID | ACCUUCUACACAAUGAAAG | 0.3961 | |
| | NO: | | NO: | | NO: | | | |
| | 549 | | 1491 | | 2433 | | | |
| MA0550 | SEQ ID | CCUUCUACACAAUGAAAGUGA | SEQ ID | ACUUUCAUUGUGUAGAAGGUC | SEQ ID | CCUUCUACACAAUGAAAGU | 0.2661 | |
| | NO: | | NO: | | NO: | | | |
| | 550 | | 1492 | | 2434 | | | |
| MA0551 | SEQ ID | CUUCUACACAAUGAAAGUGAA | SEQ ID | CACUUUCAUUGUGUAGAAGGU | SEQ ID | CUUCUACACAAUGAAAGUG | 0.4225 | |
| | NO: | | NO: | | NO: | | | |
| | 551 | | 1493 | | 2435 | | | |
| MA0552 | SEQ ID | UUCUACACAAUGAAAGUGAAU | SEQ ID | UCACUUUCAUUGUGUAGAAGG | SEQ ID | UUCUACACAAUGAAAGUGA | 0.4160 | |
| | NO: | | NO: | | NO: | | | |
| | 552 | | 1494 | | 2436 | | | |
| MA0553 | SEQ ID | UCUACACAAUGAAAGUGAAUG | SEQ ID | UUCACUUUCAUUGUGUAGAAG | SEQ ID | UCUACACAAUGAAAGUGAA | 0.2817 | |
| | NO: | | NO: | | NO: | | | |
| | 553 | | 1495 | | 2437 | | | |
| MA0554 | SEQ ID | CUACACAAUGAAAGUGAAUGA | SEQ ID | AUUCACUUUCAUUGUGUAGAA | SEQ ID | CUACACAAUGAAAGUGAAU | 0.5685 | * |
| | NO: | | NO: | | NO: | | | |
| | 554 | | 1496 | | 2438 | | | |
| MA0555 | SEQ ID | ACACAAUGAAAGUGAAUGAUG | SEQ ID | UCAUUCACUUUCAUUGUGUAG | SEQ ID | ACACAAUGAAAGUGAAUGA | 0.1776 | |
| | NO: | | NO: | | NO: | | | |
| | 555 | | 1497 | | 2439 | | | |
| MA0556 | SEQ ID | CACAAUGAAAGUGAAUGAUGG | SEQ ID | AUCAUUCACUUUCAUUGUGUA | SEQ ID | CACAAUGAAAGUGAAUGAU | 0.3592 | |
| | NO: | | NO: | | NO: | | | |
| | 556 | | 1498 | | 2440 | | | |
| MA0557 | SEQ ID | CAAUGAAAGUGAAUGAUGGUA | SEQ ID | CCAUCAUUCACUUUCAUUGUG | SEQ ID | CAAUGAAAGUGAAUGAUGG | 0.1996 | |
| | NO: | | NO: | | NO: | | | |
| | 557 | | 1499 | | 2441 | | | |
| MA0558 | SEQ ID | AAUGAAAGUGAAUGAUGGUAA | SEQ ID | ACCAUCAUUCACUUUCAUUGU | SEQ ID | AAUGAAAGUGAAUGAUGGU | 0.3948 | |
| | NO: | | NO: | | NO: | | | |
| | 558 | | 1500 | | 2442 | | | |
| MA0559 | SEQ ID | AUGAAAGUGAAUGAUGGUAAA | SEQ ID | UACCAUCAUUCACUUUCAUUG | SEQ ID | AUGAAAGUGAAUGAUGGUA | 0.4001 | |
| | NO: | | NO: | | NO: | | | |
| | 559 | | 1501 | | 2443 | | | |
| MA0560 | SEQ ID | GAAAGUGAAUGAUGGUAAAUA | SEQ ID | UUUACCAUCAUUCACUUUCAU | SEQ ID | GAAAGUGAAUGAUGGUAAA | 0.2653 | |
| | NO: | | NO: | | NO: | | | |
| | 560 | | 1502 | | 2444 | | | |
| MA0561 | SEQ ID | AAGUGAAUGAUGGUAAAUAUG | SEQ ID | UAUUUACCAUCAUUCACUUUC | SEQ ID | AAGUGAAUGAUGGUAAAUA | 0.4991 | |
| | NO: | | NO: | | NO: | | | |
| | 561 | | 1503 | | 2445 | | | |
| MA0562 | SEQ ID | AGUGAAUGAUGGUAAAUAUGU | SEQ ID | AUAUUUACCAUCAUUCACUUU | SEQ ID | AGUGAAUGAUGGUAAAUAU | 0.2388 | |
| | NO: | | NO: | | NO: | | | |
| | 562 | | 1504 | | 2446 | | | |
| MA0563 | SEQ ID | GUGAAUGAUGGUAAAUAUGUG | SEQ ID | CAUAUUUACCAUCAUUCACUU | SEQ ID | GUGAAUGAUGGUAAAUAUG | 0.3418 | |
| | NO: | | NO: | | NO: | | | |
| | 563 | | 1505 | | 2447 | | | |
| MA0564 | SEQ ID | UGAAUGAUGGUAAAUAUGUGU | SEQ ID | ACAUAUUUACCAUCAUUCACU | SEQ ID | UGAAUGAUGGUAAAUAUGU | 0.5088 | * |
| | NO: | | NO: | | NO: | | | |
| | 564 | | 1506 | | 2448 | | | |
| MA0565 | SEQ ID | GAAUGAUGGUAAAUAUGUGUG | SEQ ID | CACAUAUUUACCAUCAUUCAC | SEQ ID | GAAUGAUGGUAAAUAUGUG | 0.2323 | |
| | NO: | | NO: | | NO: | | | |
| | 565 | | 1507 | | 2449 | | | |
| MA0566 | SEQ ID | GGUAAAUAUGUGUGUGAGGCU | SEQ ID | CCUCACACACAUAUUUACCAU | SEQ ID | GGUAAAUAUGUGUGUGAGG | 0.4557 | |
| | NO: | | NO: | | NO: | | | |
| | 566 | | 1508 | | 2450 | | | |
| MA0567 | SEQ ID | AUAUGUGUGUGAGGCUGAUGG | SEQ ID | AUCAGCCUCACACACAUAUUU | SEQ ID | AUAUGUGUGUGAGGCUGAU | 0.3283 | |
| | NO: | | NO: | | NO: | | | |
| | 567 | | 1509 | | 2451 | | | |
| MA0568 | SEQ ID | UGUGUGUGAGGCUGAUGGAUU | SEQ ID | UCCAUCAGCCUCACACACAUA | SEQ ID | UGUGUGUGAGGCUGAUGGA | 0.3241 | |
| | NO: | | NO: | | NO: | | | |
| | 568 | | 1510 | | 2452 | | | |
| MA0569 | SEQ ID | GUGUGUGAGGCUGAUGGAUUC | SEQ ID | AUCCAUCAGCCUCACACACAU | SEQ ID | GUGUGUGAGGCUGAUGGAU | 0.1097 | |
| | NO: | | NO: | | NO: | | | |
| | 569 | | 1511 | | 2453 | | | |
| MA0570 | SEQ ID | UGUGUGAGGCUGAUGGAUUCU | SEQ ID | AAUCCAUCAGCCUCACACACA | SEQ ID | UGUGUGAGGCUGAUGGAUU | 0.2347 | |
| | NO: | | NO: | | NO: | | | |
| | 570 | | 1512 | | 2454 | | | |
| MA0571 | SEQ ID | GUGUGAGGCUGAUGGAUUCUG | SEQ ID | GAAUCCAUCAGCCUCACACAC | SEQ ID | GUGUGAGGCUGAUGGAUUC | 0.2909 | |
| | NO: | | NO: | | NO: | | | |
| | 571 | | 1513 | | 2455 | | | |
| MA0572 | SEQ ID | UGUGAGGCUGAUGGAUUCUGG | SEQ ID | AGAAUCCAUCAGCCUCACACA | SEQ ID | UGUGAGGCUGAUGGAUUCU | 0.3250 | |
| | NO: | | NO: | | NO: | | | |
| | 572 | | 1514 | | 2456 | | | |

TABLE 1-14

| | | | | | | | rela- | |
|---|---|---|---|---|---|---|---|---|
| double | | | | | | | tive | |
| stranded | | | | | | | ex- | |
| nucleic | | | | antisense strand | | | pres- | |
| acid | SEQ ID | sense strand sequence | SEQ ID | sequence | SEQ ID | target MASP2 | sion | |
| number | NO: | (5′--->3′) | NO: | (5′--->3′) | NO: | mRNA sequence | level | note |
| MA0573 | SEQ ID | GUGAGGCUGAUGGAUUCUGGA | SEQ ID | CAGAAUCCAUCAGCCUCACAC | SEQ ID | GUGAGGCUGAUGGAUUCUG | 0.4694 | |
| | NO: | | NO: | | NO: 2457 | | | |
| | 573 | | 1515 | | | | | |
| MA0574 | SEQ ID | GAGGCUGAUGGAUUCUGGACG | SEQ ID | UCCAGAAUCCAUCAGCCUCAC | SEQ ID | GAGGCUGAUGGAUUCUGGA | 0.3183 | |
| | NO: | | NO: | | NO: 2458 | | | |
| | 574 | | 1516 | | | | | |
| MA0575 | SEQ ID | GGCUGAUGGAUUCUGGACGAG | SEQ ID | CGUCCAGAAUCCAUCAGCCUC | SEQ ID | GGCUGAUGGAUUCUGGACG | 0.4488 | |
| | NO: | | NO: | | NO: 2459 | | | |
| | 575 | | 1517 | | | | | |
| MA0576 | SEQ ID | GCUGAUGGAUUCUGGACGAGC | SEQ ID | UCGUCCAGAAUCCAUCAGCCU | SEQ ID | GCUGAUGGAUUCUGGACGA | 0.2778 | |
| | NO: | | NO: | | NO: 2460 | | | |
| | 576 | | 1518 | | | | | |
| MA0577 | SEQ ID | GAUGGAUUCUGGACGAGCUCC | SEQ ID | AGCUCGUCCAGAAUCCAUCAG | SEQ ID | GAUGGAUUCUGGACGAGCU | 0.2956 | |
| | NO: | | NO: | | NO: 2461 | | | |
| | 577 | | 1519 | | | | | |
| MA0578 | SEQ ID | GAUUCUGGACGAGCUCCAAAG | SEQ ID | UUGGAGCUCGUCCAGAAUCCA | SEQ ID | GAUUCUGGACGAGCUCCAA | 0.3395 | |
| | NO: | | NO: | | NO: 2462 | | | |
| | 578 | | 1520 | | | | | |
| MA0579 | SEQ ID | AUUCUGGACGAGCaCCAAAGG | SEQ ID | UUUGGAGCUCGUCCAGAAUCC | SEQ ID | AUUCUGGACGAGCUCCAAA | 0.3768 | |
| | NO: | | NO: | | NO: 2463 | | | |
| | 579 | | 1521 | | | | | |
| MA0580 | SEQ ID | CUGGACGAGCUCCAAAGGAGA | SEQ ID | UCCUUUGGAGCUCGUCCAGAA | SEQ ID | CUGGACGAGCUCCAAAGGA | 0.2355 | |
| | NO: | | NO: | | NO: 2464 | | | |
| | 580 | | 1522 | | | | | |
| MA0581 | SEQ ID | UGGACGAGCUCCAAAGGAGAA | SEQ ID | CUCCUUUGGAGCUCGUCCAGA | SEQ ID | UGGACGAGCUCCAAAGGAG | 0.2817 | |
| | NO: | | NO: | | NO: 2465 | | | |
| | 581 | | 1523 | | | | | |
| MA0582 | SEQ ID | GGACGAGCUCCAAAGGAGAAA | SEQ ID | UCUCCUUUGGAGCUCGUCCAG | SEQ ID | GGACGAGCUCCAAAGGAGA | 0.1939 | |
| | NO: | | NO: | | NO: 2466 | | | |
| | 582 | | 1524 | | | | | |
| MA0583 | SEQ ID | GACGAGCUCCAAAGGAGAAAA | SEQ ID | UUCUCCUUUGGAGCUCGUCCA | SEQ ID | GACGAGCUCCAAAGGAGAA | 0.4187 | |
| | NO: | | NO: | | NO: 2467 | | | |
| | 583 | | 1525 | | | | | |
| MA0584 | SEQ ID | CGAGCUCCAAAGGAGAAAAAU | SEQ ID | UUUUCUCCUUUGGAGCUCGUC | SEQ ID | CGAGCUCCAAAGGAGAAAA | 0.4469 | |
| | NO: | | NO: | | NO: 2468 | | | |
| | 584 | | 1526 | | | | | |
| MA0585 | SEQ ID | GAGCUCCAAAGGAGAAAAAUC | SEQ ID | UUUUUCUCCUUUGGAGCUCGU | SEQ ID | GAGCUCCAAAGGAGAAAAA | 0.3593 | |
| | NO: | | NO: | | NO: 2469 | | | |
| | 585 | | 1527 | | | | | |
| MA0586 | SEQ ID | AGCUCCAAAGGAGAAAAAUCA | SEQ ID | AUUUUUCUCCUUUGGAGCUCG | SEQ ID | AGCUCCAAAGGAGAAAAAU | 0.4459 | |
| | NO: | | NO: | | NO: 2470 | | | |
| | 586 | | 1528 | | | | | |
| MA0587 | SEQ ID | GCUCCAAAGGAGAAAAAUCAC | SEQ ID | GAUUUUUCUCCUUUGGAGCUC | SEQ ID | GCUCCAAAGGAGAAAAAUC | 0.4857 | * |
| | NO: | | NO: | | NO: 2471 | | | |
| | 587 | | 1529 | | | | | |
| MA0588 | SEQ ID | CUCCAAAGGAGAAAAAUCACU | SEQ ID | UGAUUUUUCUCCUUUGGAGCU | SEQ ID | CUCCAAAGGAGAAAAAUCA | 0.1871 | |
| | NO: | | NO: | | NO: 2472 | | | |
| | 588 | | 1530 | | | | | |
| MA0589 | SEQ ID | CCAAAGGAGAAAAAUCACUCC | SEQ ID | AGUGAUUUUUCUCCUUUGGAG | SEQ ID | CCAAAGGAGAAAAAUCACU | 0.3475 | |
| | NO: | | NO: | | NO: 2473 | | | |
| | 589 | | 1531 | | | | | |
| MA0590 | SEQ ID | AGGAGAAAAAUCACUCCCAGU | SEQ ID | UGGGAGUGAUUUUUCUCCUUU | SEQ ID | AGGAGAAAAAUCACUCCCA | 0.4639 | |
| | NO: | | NO: | | NO: 2474 | | | |
| | 590 | | 1532 | | | | | |
| MA0591 | SEQ ID | GGAGAAAAAUCACUCCCAGUC | SEQ ID | CUGGGAGUGAUUUUUCUCCUU | SEQ ID | GGAGAAAAAUCACUCCCAG | 0.4155 | |
| | NO: | | NO: | | NO: 2475 | | | |
| | 591 | | 1533 | | | | | |
| MA0592 | SEQ ID | AGAAAAAUCACUCCCAGUCUG | SEQ ID | GACUGGGAGUGAUUUUUCUCC | SEQ ID | AGAAAAAUCACUCCCAGUC | 0.3251 | |
| | NO: | | NO: | | NO: 2476 | | | |
| | 592 | | 1534 | | | | | |
| MA0593 | SEQ ID | GAAAAAUCACUCCCAGUCUGU | SEQ ID | AGACUGGGAGUGAUUUUUCUC | SEQ ID | GAAAAAUCACUCCCAGUCU | 0.3061 | |
| | NO: | | NO: | | NO: 2477 | | | |
| | 593 | | 1535 | | | | | |
| MA0594 | SEQ ID | AAAAAUCACUCCCAGUCUGUG | SEQ ID | CAGACUGGGAGUGAUUUUUCU | SEQ ID | AAAAAUCACUCCCAGUCUG | 0.5931 | * |
| | NO: | | NO: | | NO: 2478 | | | |
| | 594 | | 1536 | | | | | |
| MA0595 | SEQ ID | AAAAUCACUCCCAGUCUGUGA | SEQ ID | ACAGACUGGGAGUGAUUUUUC | SEQ ID | AAAAUCACUCCCAGUCUGU | 0.5196 | * |
| | NO: | | NO: | | NO: 2479 | | | |
| | 595 | | 1537 | | | | | |
| MA0596 | SEQ ID | CUCCCAGUCUGUGAGCCUGUU | SEQ ID | CAGGCUCACAGACUGGGAGUG | SEQ ID | CUCCCAGUCUGUGAGCCUG | 0.4157 | |
| | NO: | | NO: | | NO: 2480 | | | |
| | 596 | | 1538 | | | | | |
| MA0597 | SEQ ID | UCCCAGUCUGUGAGCCUGUUU | SEQ ID | ACAGGCUCAGAGACUGGGAGU | SEQ ID | UCCCAGUCUGUGAGCCUGU | 0.4504 | |
| | NO: | | NO: | | NO: 2481 | | | |
| | 597 | | 1539 | | | | | |
| MA0598 | SEQ ID | CCCAGUCUGUGAGCCUGUUUG | SEQ ID | AACAGGCUCACAGACUGGGAG | SEQ ID | CCCAGUCUGUGAGCCUGUU | 0.4836 | * |
| | NO: | | NO: | | NO: 2482 | | | |
| | 598 | | 1540 | | | | | |
| MA0599 | SEQ ID | CAGUCUGUGAGCCUGUUUGUG | SEQ ID | CAAACAGGCUCACAGACUGGG | SEQ ID | CAGUCUGUGAGCCUGUUUG | 0.4572 | |
| | NO: | | NO: | | NO: 2483 | | | |
| | 599 | | 1541 | | | | | |
| MA0600 | SEQ ID | CUGUGAGCCUGUUUGUGGACU | SEQ ID | UCCACAAACAGGCUCACAGAC | SEQ ID | CUGUGAGCCUGUUUGUGGA | 0.3947 | |
| | NO: | | NO: | | NO: 2484 | | | |
| | 600 | | 1542 | | | | | |
| MA0601 | SEQ ID | UGAGCCUGUUUGUGGACUAUC | SEQ ID | UAGUCCACAAACAGGCUCACA | SEQ ID | UGAGCCUGUUUGUGGACUA | 0.5071 | * |
| | NO: | | NO: | | NO: 2485 | | | |
| | 601 | | 1543 | | | | | |
| MA0602 | SEQ ID | GCCUGUUUGUGGACUAUCAGC | SEQ ID | UGAUAGUCCACAAACAGGCUC | SEQ ID | GCCUGUUUGUGGACUAUCA | 0.4543 | |
| | NO: | | NO: | | NO: 2486 | | | |
| | 602 | | 1544 | | | | | |
| MA0603 | SEQ ID | CCUGUUUGUGGACUAUCAGCC | SEQ ID | CUGAUAGUCCACAAACAGGCU | SEQ ID | CCUGUUUGUGGACUAUCAG | 0.5234 | * |
| | NO: | | NO: | | NO: 2487 | | | |
| | 603 | | 1545 | | | | | |
| MA0604 | SEQ ID | CUGUUUGUGGACUAUCAGCCC | SEQ ID | GCUGAUAGUCCACAAACAGGC | SEQ ID | CUGUUUGUGGACUAUCAGC | 0.4479 | * |
| | NO: | | NO: | | NO: 2488 | | | |
| | 604 | | 1546 | | | | | |
| MA0605 | SEQ ID | UGGACUAUCAGCCCGCACAAC | SEQ ID | UGUGCGGGCUGAUAGUCCACA | SEQ ID | UGGACUAUCAGCCCGCACA | 0.4976 | * |
| | NO: | | NO: | | NO: 2489 | | | |
| | 605 | | 1547 | | | | | |
| MA0606 | SEQ ID | ACUAUCAGCCCGCACAACAGG | SEQ ID | UGUUGUGCGGGCUGAUAGUCC | SEQ ID | ACUAUCAGCCCGCACAACA | 0.4484 | |
| | NO: | | NO: | | NO: 2490 | | | |
| | 606 | | 1548 | | | | | |
| MA0607 | SEQ ID | CUAUCAGCCCGCACAACAGGA | SEQ ID | CUGUUGUGCGGGCUGAUAGUC | SEQ ID | CUAUCAGCCCGCACAACAG | 0.2952 | |
| | NO: | | NO: | | NO: 2491 | | | |
| | 607 | | 1549 | | | | | |
| MA0608 | SEQ ID | CCGCACAACAGGAGGGCGUAU | SEQ ID | ACGCCCUCCUGUUGUGCGGGC | SEQ ID | CCGCACAACAGGAGGGCGU | 0.3233 | |
| | NO: | | NO: | | NO: 2492 | | | |
| | 608 | | 1550 | | | | | |
| MA0609 | SEQ ID | CGCACAACAGGAGGGCGUAUA | SEQ ID | UACGCCCUCCUGUUGUGCGGG | SEQ ID | CGCACAACAGGAGGGCGUA | 0.2263 | |
| | NO: | | NO: | | NO: 2493 | | | |
| | 609 | | 1551 | | | | | |
| MA0610 | SEQ ID | GCACAACAGGAGGGCGUAUAU | SEQ ID | AUACGCCCUCCUGUUGUGCGG | SEQ ID | GCACAACAGGAGGGCGUAU | 0.4521 | |
| | NO: | | NO: | | NO: 2494 | | | |
| | 610 | | 1552 | | | | | |
| MA0611 | SEQ ID | CACAACAGGAGGGCGUAUAUA | SEQ ID | UAUACGCCCUCCUGUUGUGCG | SEQ ID | CACAACAGGAGGGCGUAUA | 0.1227 | |
| | NO: | | NO: | | NO: 2495 | | | |
| | 611 | | 1553 | | | | | |
| MA0612 | SEQ ID | ACAACAGGAGGGCGUAUAUAU | SEQ ID | AUAUACGCCCUCCUGUUGUGC | SEQ ID | ACAACAGGAGGGCGUAUAU | 0.0915 | |
| | NO: | | NO: | | NO: 2496 | | | |
| | 612 | | 1554 | | | | | |
| MA0613 | SEQ ID | CAACAGGAGGGCGUAUAUAUG | SEQ ID | UAUAUACGCCCUCCUGUUGUG | SEQ ID | CAACAGGAGGGCGUAUAUA | 0.3367 | |
| | NO: | | NO: | | NO: 2497 | | | |
| | 613 | | 1555 | | | | | |
| MA0614 | SEQ ID | AACAGGAGGGCGUAUAUAUGG | SEQ ID | AUAUAUACGCCCUCCUGUUGU | SEQ ID | AACAGGAGGGCGUAUAUAU | 0.4134 | |
| | NO: | | NO: | | NO: 2498 | | | |
| | 614 | | 1556 | | | | | |
| MA0615 | SEQ ID | GCGUAUAUAUGGAGGGCAAAA | SEQ ID | UUGCCCUCCAUAUAUACGCCC | SEQ ID | GCGUAUAUAUGGAGGGCAA | 0.3278 | |
| | NO: | | NO: | | NO: 2499 | | | |
| | 615 | | 1557 | | | | | |
| MA0616 | SEQ ID | CGUAUAUAUGGAGGGCAAAAG | SEQ ID | UUUGCCCUCCAUAUAUACGCC | SEQ ID | CGUAUAUAUGGAGGGCAAA | 0.4800 | |
| | NO: | | NO: | | NO: 2500 | | | |
| | 616 | | 1558 | | | | | |

TABLE 1-15

| | | | | | | | rela- | |
|---|---|---|---|---|---|---|---|---|
| double | | | | | | | tive | |
| stranded | | | | | | | ex- | |
| nucleic | | | | antisense strand | | | pres- | |
| acid | SEQ ID | sense strand sequence | SEQ ID | sequence | SEQ ID | target MASP2 | sion | |
| number | NO: | (5′--->3′) | NO: | (5′--->3′) | NO: | mRNA sequence | level | note |
| MA0617 | SEQ ID | AUAUGGAGGGCAAAAGGCAAA | SEQ ID | UGCCUUUUGCCCUCCAUAUAU | SEQ ID | AUAUGGAGGGCAAAAGGCA | 0.4880 | * |
| | NO: | | NO: | | NO: 2501 | | | |
| | 617 | | 1559 | | | | | |
| MA0618 | SEQ ID | UAUGGAGGGCAAAAGGCAAAA | SEQ ID | UUGCCUUUUGCCCUCCAUAUA | SEQ ID | UAUGGAGGGCAAAAGGCAA | 0.3547 | |
| | NO: | | NO: | | NO: 2502 | | | |
| | 618 | | 1560 | | | | | |
| MA0619 | SEQ ID | GGAGGGCAAAAGGCAAAACCU | SEQ ID | GUUUUGCCUUUUGCCCUCCAU | SEQ ID | GGAGGGCAAAAGGCAAAAC | 0.4989 | |
| | NO: | | NO: | | NO: 2503 | | | |
| | 619 | | 1561 | | | | | |
| MA0620 | SEQ ID | AGGGCAAAAGGCAAAACCUGG | SEQ ID | AGGUUUUGCCUUUUGCCCUCC | SEQ ID | AGGGCAAAAGGCAAAACCU | 0.4328 | |
| | NO: | | NO: | | NO: 2504 | | | |
| | 620 | | 1562 | | | | | |
| MA0621 | SEQ ID | GGGCAAAAGGCAAAACCUGGU | SEQ ID | CAGGUUUUGCCUUUUGCCCUC | SEQ ID | GGGCAAAAGGCAAAACCUG | 0.2519 | |
| | NO: | | NO: | | NO: 2505 | | | |
| | 621 | | 1563 | | | | | |
| MA0622 | SEQ ID | GGCAAAAGGCAAAACCUGGUG | SEQ ID | CCAGGUUUUGCCUUUUGCCCU | SEQ ID | GGCAAAAGGCAAAACCUGG | 0.1468 | |
| | NO: | | NO: | | NO: 2506 | | | |
| | 622 | | 1564 | | | | | |
| MA0623 | SEQ ID | GCAAAAGGCAAAACCUGGUGA | SEQ ID | ACCAGGUUUUGCCUUUUGCCC | SEQ ID | GCAAAAGGCAAAACCUGGU | 0.2368 | |
| | NO: | | NO: | | NO: 2507 | | | |
| | 623 | | 1565 | | | | | |
| MA0624 | SEQ ID | AAAGGCAAAACCUGGUGAUUU | SEQ ID | AUCACCAGGUUUUGCCUUUUG | SEQ ID | AAAGGCAAAACCUGGUGAU | 0.4016 | |
| | NO: | | NO: | | NO: 2508 | | | |
| | 624 | | 1566 | | | | | |
| MA0625 | SEQ ID | AAGGCAAAACCUGGUGAUUUU | SEQ ID | AAUCACCAGGUUUUGCCUUUU | SEQ ID | AAGGCAAAACCUGGUGAUU | 0.3840 | |
| | NO: | | NO: | | NO: 2509 | | | |
| | 625 | | 1567 | | | | | |
| MA0626 | SEQ ID | AGGCAAAACCUGGUGAUUUUC | SEQ ID | AAAUCACCAGGUUUUGCCUUU | SEQ ID | AGGCAAAACCUGGUGAUUU | 0.3041 | |
| | NO: | | NO: | | NO: 2510 | | | |
| | 626 | | 1568 | | | | | |
| MA0627 | SEQ ID | GGCAAAACCUGGUGAUUUUCC | SEQ ID | AAAAUCACCAGGUUUUGCCUU | SEQ ID | GGCAAAACCUGGUGAUUUU | 0.2229 | |
| | NO: | | NO: | | NO: 2511 | | | |
| | 627 | | 1569 | | | | | |
| MA0628 | SEQ ID | GCAAAACCUGGUGAUUUUCCU | SEQ ID | GAAAAUCACCAGGUUUUGCCU | SEQ ID | GCAAAACCUGGUGAUUUUC | 0.3537 | |
| | NO: | | NO: | | NO: 2512 | | | |
| | 628 | | 1570 | | | | | |
| MA0629 | SEQ ID | AAAACCUGGUGAUUUUCCUUG | SEQ ID | AGGAAAAUCACCAGGUUUUGC | SEQ ID | AAAACCUGGUGAUUUUCCU | 0.1861 | |
| | NO: | | NO: | | NO: 2513 | | | |
| | 629 | | 1571 | | | | | |
| MA0630 | SEQ ID | AAACCUGGUGAUUUUCCUUGG | SEQ ID | AAGGAAAAUCACCAGGUUUUG | SEQ ID | AAACCUGGUGAUUUUCCUU | 0.2314 | |
| | NO: | | NO: | | NO: 2514 | | | |
| | 630 | | 1572 | | | | | |
| MA0631 | SEQ ID | ACCUGGUGAUUUUCCUUGGCA | SEQ ID | CCAAGGAAAAUCACCAGGUUU | SEQ ID | ACCUGGUGAUUUUCCUUGG | 0.5703 | * |
| | NO: | | NO: | | NO: 2515 | | | |
| | 631 | | 1573 | | | | | |
| MA0632 | SEQ ID | CCUGGUGADUUUCCUUGGCAA | SEQ ID | GCCAAGGAAAAUCACCAGGUU | SEQ ID | CCUGGUGAUUUUCCUUGGC | 0.1702 | |
| | NO: | | NO: | | NO: 2516 | | | |
| | 632 | | 1574 | | | | | |
| MA0633 | SEQ ID | CUGGUGAUUUUCCUUGGCAAG | SEQ ID | UGCCAAGGAAAAUCACCAGGU | SEQ ID | CUGGUGAUUUUCCUUGGCA | 0.1609 | |
| | NO: | | NO: | | NO: 2517 | | | |
| | 633 | | 1575 | | | | | |
| MA0634 | SEQ ID | UGGUGAUUUUCCUUGGCAAGU | SEQ ID | UUGCCAAGGAAAAUCACCAGG | SEQ ID | UGGUGAUUUUCCUUGGCAA | 0.1500 | |
| | NO: | | NO: | | NO: 2518 | | | |
| | 634 | | 1576 | | | | | |
| MA0635 | SEQ ID | GGUGAUUUUCCUUGGCAAGUC | SEQ ID | CUUGCCAAGGAAAAUCACCAG | SEQ ID | GGUGADUUUCCUUGGCAAG | 0.2815 | |
| | NO: | | NO: | | NO: 2519 | | | |
| | 635 | | 1577 | | | | | |
| MA0636 | SEQ ID | GUGAUUUUCCUUGGCAAGUCC | SEQ ID | ACUUGCCAAGGAAAAUCACCA | SEQ ID | GUGAUUUUCCUUGGCAAGU | 0.3443 | |
| | NO: | | NO: | | NO: 2520 | | | |
| | 636 | | 1578 | | | | | |
| MA0637 | SEQ ID | UGAUUUUCCUUGGCAAGUCCU | SEQ ID | GACUUGCCAAGGAAAAUCACC | SEQ ID | UGAUUUUCCUUGGCAAGUC | 0.4070 | |
| | NO: | | NO: | | NO: 2521 | | | |
| | 637 | | 1579 | | | | | |
| MA0638 | SEQ ID | GAUUUUCCUUGGCAAGUCCUG | SEQ ID | GGACUUGCCAAGGAAAAUCAC | SEQ ID | GAUUUUCCUUGGCAAGUCC | 0.3956 | |
| | NO: | | NO: | | NO: 2522 | | | |
| | 638 | | 1580 | | | | | |
| MA0639 | SEQ ID | UCCUUGGCAAGUCCUGAUAUU | SEQ ID | UAUCAGGACUUGCCAAGGAAA | SEQ ID | UCCUUGGCAAGUCCUGAUA | 0.3508 | |
| | NO: | | NO: | | NO: 2523 | | | |
| | 639 | | 1581 | | | | | |
| MA0640 | SEQ ID | CCUUGGCAAGUCCUGAUAUUA | SEQ ID | AUAUCAGGACUUGCCAAGGAA | SEQ ID | CCUUGGCAAGUCCUGAUAU | 0.2376 | |
| | NO: | | NO: | | NO: 2524 | | | |
| | 640 | | 1582 | | | | | |
| MA0641 | SEQ ID | CUUGGCAAGUCCUGAUAUUAG | SEQ ID | AAUAUCAGGACUUGCCAAGGA | SEQ ID | CUUGGCAAGUCCUGAUAUU | 0.3199 | |
| | NO: | | NO: | | NO: 2525 | | | |
| | 641 | | 1583 | | | | | |
| MA0642 | SEQ ID | UUGGCAAGUCCUGAUAUUAGG | SEQ ID | UAAUAUCAGGACUUGCCAAGG | SEQ ID | UUGGCAAGUCCUGAUAUUA | 0.4101 | |
| | NO: | | NO: | | NO: 2526 | | | |
| | 642 | | 1584 | | | | | |
| MA0643 | SEQ ID | GGCAAGUCCUGAUAUUAGGUG | SEQ ID | CCUAAUAUCAGGACUUGCCAA | SEQ ID | GGCAAGUCCUGAUAUUAGG | 0.1383 | |
| | NO: | | NO: | | NO: 2527 | | | |
| | 643 | | 1585 | | | | | |
| MA0644 | SEQ ID | GCAAGUCCUGAUAUUAGGUGG | SEQ ID | ACCUAAUAUCAGGACUUGCCA | SEQ ID | GCAAGUCCUGAUAUUAGGU | 0.2269 | |
| | NO: | | NO: | | NO: 2528 | | | |
| | 644 | | 1586 | | | | | |
| MA0645 | SEQ ID | AGUCCUGAUAUUAGGUGGAAC | SEQ ID | UCCACCUAAUAUCAGGACUUG | SEQ ID | AGUCCUGAUAUUAGGUGGA | 0.5441 | |
| | NO: | | NO: | | NO: 2529 | | | |
| | 645 | | 1587 | | | | | |
| MA0646 | SEQ ID | GUCCUGAUAUUAGGUGGAACC | SEQ ID | UUCCACCUAAUAUCAGGACUU | SEQ ID | GUCCUGAUAUUAGGUGGAA | 0.4556 | |
| | NO: | | NO: | | NO: 2530 | | | |
| | 646 | | 1588 | | | | | |
| MA0647 | SEQ ID | UCCUGAUAUUAGGUGGAACCA | SEQ ID | GUUCCACCUAAUAUCAGGACU | SEQ ID | UCCUGAUAUUAGGUGGAAC | 0.5311 | * |
| | NO: | | NO: | | NO: 2531 | | | |
| | 647 | | 1589 | | | | | |
| MA0648 | SEQ ID | CCUGAUAUUAGGUGGAACCAC | SEQ ID | GGUUCCACCUAAUAUCAGGAC | SEQ ID | CCUGAUAUUAGGUGGAACC | 0.3381 | |
| | NO: | | NO: | | NO: 2532 | | | |
| | 648 | | 1590 | | | | | |
| MA0649 | SEQ ID | GAUAUUAGGUGGAACCACAGC | SEQ ID | UGUGGUUCCACCUAAUAUCAG | SEQ ID | GAUAUUAGGUGGAACCACA | 0.1224 | |
| | NO: | | NO: | | NO: 2533 | | | |
| | 649 | | 1591 | | | | | |
| MA0650 | SEQ ID | AUUAGGUGGAACCACAGCAGC | SEQ ID | UGCUGUGGUUCCACCUAAUAU | SEQ ID | AUUAGGUGGAACCACAGCA | 0.5344 | * |
| | NO: | | NO: | | NO: 2534 | | | |
| | 650 | | 1592 | | | | | |
| MA0651 | SEQ ID | UUAGGUGGAACCACAGCAGCA | SEQ ID | CUGCUGUGGUUCCACCUAAUA | SEQ ID | UUAGGUGGAACCACAGCAG | 0.5391 | |
| | NO: | | NO: | | NO: 2535 | | | |
| | 651 | | 1593 | | | | | |
| MA0652 | SEQ ID | AGGUGGAACCACAGCAGCAGG | SEQ ID | UGCUGCUGUGGUUCCACCUAA | SEQ ID | AGGUGGAACCACAGCAGCA | 0.1599 | |
| | NO: | | NO: | | NO: 2536 | | | |
| | 652 | | 1594 | | | | | |
| MA0653 | SEQ ID | GGUGGAACCACAGCAGCAGGU | SEQ ID | CUGCUGCUGUGGUUCCACCUA | SEQ ID | GGUGGAACCACAGCAGCAG | 0.0858 | |
| | NO: | | NO: | | NO: 2537 | | | |
| | 653 | | 1595 | | | | | |
| MA0654 | SEQ ID | GUGGAACCACAGCAGCAGGUG | SEQ ID | CCUGCUGCUGUGGUUCCACCU | SEQ ID | GUGGAACCACAGCAGCAGG | 0.5782 | * |
| | NO: | | NO: | | NO: 2538 | | | |
| | 654 | | 1596 | | | | | |
| MA0655 | SEQ ID | GAACCACAGCAGCAGGUGCAC | SEQ ID | GCACCUGCUGCUGUGGUUCCA | SEQ ID | GAACCACAGCAGCAGGUGC | 0.3427 | |
| | NO: | | NO: | | NO: 2539 | | | |
| | 655 | | 1597 | | | | | |
| MA0656 | SEQ ID | AACCACAGCAGCAGGUGCACU | SEQ ID | UGCACCUGCUGCUGUGGUUCC | SEQ ID | AACCACAGCAGCAGGUGCA | 0.3562 | |
| | NO: | | NO: | | NO: 2540 | | | |
| | 656 | | 1598 | | | | | |
| MA0657 | SEQ ID | ACCACAGCAGCAGGUGCACUU | SEQ ID | GUGCACCUGCUGCUGUGGUUC | SEQ ID | ACCACAGCAGCAGGUGCAC | 0.5252 | |
| | NO: | | NO: | | NO: 2541 | | | |
| | 657 | | 1599 | | | | | |
| MA0658 | SEQ ID | CCACAGCAGCAGGUGCACUUU | SEQ ID | AGUGCACCUGCUGCUGUGGUU | SEQ ID | CCACAGCAGCAGGUGCACU | 0.4436 | |
| | NO: | | NO: | | NO: 2542 | | | |
| | 658 | | 1600 | | | | | |
| MA0659 | SEQ ID | CACAGCAGCAGGUGCACUUUU | SEQ ID | AAGUGCACCUGCUGCUGUGGU | SEQ ID | CACAGCAGCAGGUGCACUU | 0.4283 | |
| | NO: | | NO: | | NO: 2543 | | | |
| | 659 | | 1601 | | | | | |
| MA0660 | SEQ ID | ACAGCAGCAGGUGCACUUUUA | SEQ ID | AAAGUGCACCUGCUGCUGUGG | SEQ ID | ACAGCAGCAGGUGCACUUU | 0.1498 | |
| | NO: | | NO: | | NO: 2544 | | | |
| | 660 | | 1602 | | | | | |

TABLE 1-16

| | | | | | | | rela- | |
|---|---|---|---|---|---|---|---|---|
| double | | | | | | | tive | |
| stranded | | | | | | | ex- | |
| nucleic | | | | antisense strand | | | pres- | |
| acid | SEQ ID | sense strand sequence | SEQ ID | sequence | SEQ ID | target MASP2 | sion | |
| number | NO: | (5′--->3′) | NO: | (5′--->3′) | NO: | mRNA sequence | level | note |
| MA0661 | SEQ ID | CAGCAGCAGGUGCACUUUUAU | SEQ ID | AAAAGUGCACCUGCUGCUGUG | SEQ ID | CAGCAGCAGGUGCACUUUU | 0.2579 | |
| | NO: | | NO: | | NO: 2545 | | | |
| | 661 | | 1603 | | | | | |
| MA0662 | SEQ ID | AGCAGCAGGUGCACUUUUAUA | SEQ ID | UAAAAGUGCACCUGCUGCUGU | SEQ ID | AGCAGCAGGUGCACUUUUA | 0.3752 | |
| | NO: | | NO: | | NO: 2546 | | | |
| | 662 | | 1604 | | | | | |
| MA0663 | SEQ ID | CAGCAGGUGCACUUUUAUAUG | SEQ ID | UAUAAAAGUGCACCUGCUGCU | SEQ ID | CAGCAGGUGCACUUUUAUA | 0.4298 | |
| | NO: | | NO: | | NO: 2547 | | | |
| | 663 | | 1605 | | | | | |
| MA0664 | SEQ ID | AGCAGGUGCACUUUUAUAUGA | SEQ ID | AUAUAAAAGUGCACCUGCUGC | SEQ ID | AGCAGGUGCACUUUUAUAU | 0.3065 | |
| | NO: | | NO: | | NO: 2548 | | | |
| | 664 | | 1606 | | | | | |
| MA0665 | SEQ ID | GCAGGUGCACUUUUAUAUGAC | SEQ ID | CAUAUAAAAGUGCACCUGCUG | SEQ ID | GCAGGUGCACUUUUAUAUG | 0.4590 | |
| | NO: | | NO: | | NO: 2549 | | | |
| | 665 | | 1607 | | | | | |
| MA0666 | SEQ ID | CAGGUGCACUUUUAUAUGACA | SEQ ID | UCAUAUAAAAGUGCACCUGCU | SEQ ID | CAGGUGCACUUUUAUAUGA | 0.0834 | |
| | NO: | | NO: | | NO: 2550 | | | |
| | 666 | | 1608 | | | | | |
| MA0667 | SEQ ID | AGGUGCACUUUUAUAUGACAA | SEQ ID | GUCAUAUAAAAGUGCACCUGC | SEQ ID | AGGUGCACUUUUAUAUGAC | 0.2991 | |
| | NO: | | NO: | | NO: 2551 | | | |
| | 667 | | 1609 | | | | | |
| MA0668 | SEQ ID | GGUGCACUUUUAUAUGACAAC | SEQ ID | UGUCAUAUAAAAGUGCACCUG | SEQ ID | GGUGCACUUUUAUAUGACA | 0.0999 | |
| | NO: | | NO: | | NO: 2552 | | | |
| | 668 | | 1610 | | | | | |
| MA0669 | SEQ ID | GUGCACUUUUAUAUGACAACU | SEQ ID | UUGUCAUAUAAAAGUGCACCU | SEQ ID | GUGCACUUUUAUAUGACAA | 0.2829 | |
| | NO: | | NO: | | NO: 2553 | | | |
| | 669 | | 1611 | | | | | |
| MA0670 | SEQ ID | GCACUUUUAUAUGACAACUGG | SEQ ID | AGUUGUCAUAUAAAAGUGCAC | SEQ ID | GCACUUUUAUAUGACAACU | 0.3893 | |
| | NO: | | NO: | | NO: 2554 | | | |
| | 670 | | 1612 | | | | | |
| MA0671 | SEQ ID | CACUUUUAUAUGACAACUGGG | SEQ ID | CAGUUGUCAUAUAAAAGUGCA | SEQ ID | CACUUUUAUAUGACAACUG | 0.4472 | * |
| | NO: | | NO: | | NO: 2555 | | | |
| | 671 | | 1613 | | | | | |
| MA0672 | SEQ ID | AUAUGACAACUGGGUCCUAAC | SEQ ID | UAGGACCCAGUUGUCAUAUAA | SEQ ID | AUAUGACAACUGGGUCCUA | 0.4865 | |
| | NO: | | NO: | | NO: 2556 | | | |
| | 672 | | 1614 | | | | | |
| MA0673 | SEQ ID | UAUGACAACUGGGUCCUAACA | SEQ ID | UUAGGACCCAGUUGUCAUAUA | SEQ ID | UAUGACAACUGGGUCCUAA | 0.2445 | |
| | NO: | | NO: | | NO: 2557 | | | |
| | 673 | | 1615 | | | | | |
| MA0674 | SEQ ID | CAACUGGGUCCUAACAGCUGC | SEQ ID | AGCUGUUAGGACCCAGUUGUC | SEQ ID | CAACUGGGUCCUAACAGCU | 0.1608 | |
| | NO: | | NO: | | NO: 2558 | | | |
| | 674 | | 1616 | | | | | |
| MA0675 | SEQ ID | AACUGGGUCCUAACAGCUGCU | SEQ ID | CAGCUGUUAGGACCCAGUUGU | SEQ ID | AACUGGGUCCUAACAGCUG | 0.3745 | |
| | NO: | | NO: | | NO: 2559 | | | |
| | 675 | | 1617 | | | | | |
| MA0676 | SEQ ID | ACUGGGUCCUAACAGCUGCUC | SEQ ID | GCAGCUGUUAGGACCCAGUUG | SEQ ID | ACUGGGUCCUAACAGCUGC | 0.4935 | * |
| | NO: | | NO: | | NO: 2560 | | | |
| | 676 | | 1618 | | | | | |
| MA0677 | SEQ ID | GGGUCCUAACAGCUGCUCAUG | SEQ ID | UGAGCAGCUGUUAGGACCCAG | SEQ ID | GGGUCCUAACAGCUGCUCA | 0.5722 | |
| | NO: | | NO: | | NO: 2561 | | | |
| | 677 | | 1619 | | | | | |
| MA0678 | SEQ ID | GGUCCUAACAGCUGCUCAUGC | SEQ ID | AUGAGCAGCUGUUAGGACCCA | SEQ ID | GGUCCUAACAGCUGCUCAU | 0.2446 | |
| | NO: | | NO: | | NO: 2562 | | | |
| | 678 | | 1620 | | | | | |
| MA0679 | SEQ ID | ACAGCUGCUCAUGCCGUCUAU | SEQ ID | AGACGGCAUGAGCAGCUGUUA | SEQ ID | ACAGCUGCUCAUGCCGUCU | 0.2732 | |
| | NO: | | NO: | | NO: 2563 | | | |
| | 679 | | 1621 | | | | | |
| MA0680 | SEQ ID | AGCUGCUCAUGCCGUCUAUGA | SEQ ID | AUAGACGGCAUGAGCAGCUGU | SEQ ID | AGCUGCUCAUGCCGUCUAU | 0.5858 | |
| | NO: | | NO: | | NO: 2564 | | | |
| | 680 | | 1622 | | | | | |
| MA0681 | SEQ ID | CUGCUCAUGCCGUCUAUGAGC | SEQ ID | UCAUAGACGGCAUGAGCAGCU | SEQ ID | CUGCUCAUGCCGUCUAUGA | 0.3854 | |
| | NO: | | NO: | | NO: 2565 | | | |
| | 681 | | 1623 | | | | | |
| MA0682 | SEQ ID | UCAUGCCGUCUAUGAGCAAAA | SEQ ID | UUGCUCAUAGACGGCAUGAGC | SEQ ID | UCAUGCCGUCUAUGAGCAA | 0.5233 | * |
| | NO: | | NO: | | NO: 2566 | | | |
| | 682 | | 1624 | | | | | |
| MA0683 | SEQ ID | UGCCGUCUAUGAGCAAAAACA | SEQ ID | UUUUUGCUCAUAGACGGCAUG | SEQ ID | UGCCGUCUAUGAGCAAAAA | 0.5085 | * |
| | NO: | | NO: | | NO: 2567 | | | |
| | 683 | | 1625 | | | | | |
| MA0684 | SEQ ID | CCGUCUAUGAGCAAAAACAUG | SEQ ID | UGUUUUUGCUCAUAGACGGCA | SEQ ID | CCGUCUAUGAGCAAAAACA | 0.2050 | |
| | NO: | | NO: | | NO: 2568 | | | |
| | 684 | | 1626 | | | | | |
| MA0685 | SEQ ID | CGUCUAUGAGCAAAAACAUGA | SEQ ID | AUGUUUUUGCUCAUAGACGGC | SEQ ID | CGUCUAUGAGCAAAAACAU | 0.2724 | |
| | NO: | | NO: | | NO: 2569 | | | |
| | 685 | | 1627 | | | | | |
| MA0686 | SEQ ID | UCUAUGAGCAAAAACAUGAUG | SEQ ID | UCAUGUUUUUGCUCAUAGACG | SEQ ID | UCUAUGAGCAAAAACAUGA | 0.3618 | |
| | NO: | | NO: | | NO: 2570 | | | |
| | 686 | | 1628 | | | | | |
| MA0687 | SEQ ID | CUAUGAGCAAAAACAUGAUGC | SEQ ID | AUCAUGUUUUUGCUCAUAGAC | SEQ ID | CUAUGAGCAAAAACAUGAU | 0.5215 | * |
| | NO: | | NO: | | NO: 2571 | | | |
| | 687 | | 1629 | | | | | |
| MA0688 | SEQ ID | UGAGCAAAAACAUGAUGCAUC | SEQ ID | UGCAUCAUGUUUUUGCUCAUA | SEQ ID | UGAGCAAAAACAUGAUGCA | 0.4025 | |
| | NO: | | NO: | | NO: 2572 | | | |
| | 688 | | 1630 | | | | | |
| MA0689 | SEQ ID | GAGCAAAAACAUGAUGCAUCC | SEQ ID | AUGCAUCAUGUUUUUGCUCAU | SEQ ID | GAGCAAAAACAUGAUGCAU | 0.4620 | |
| | NO: | | NO: | | NO: 2573 | | | |
| | 689 | | 1631 | | | | | |
| MA0690 | SEQ ID | GCAAAAACAUGAUGCAUCCGC | SEQ ID | GGAUGCAUCAUGUUUUUGCUC | SEQ ID | GCAAAAACAUGAUGCAUCC | 0.3825 | |
| | NO: | | NO: | | NO: 2574 | | | |
| | 690 | | 1632 | | | | | |
| MA0691 | SEQ ID | GAUGCAUCCGCCCUGGACAUU | SEQ ID | UGUCCAGGGCGGAUGCAUCAU | SEQ ID | GAUGCAUCCGCCCUGGACA | 0.3141 | |
| | NO: | | NO: | | NO: 2575 | | | |
| | 691 | | 1633 | | | | | |
| MA0692 | SEQ ID | AUGCAUCCGCCCUGGACAUUC | SEQ ID | AUGUCCAGGGCGGAUGCAUCA | SEQ ID | AUGCAUCCGCCCUGGACAU | 0.5124 | |
| | NO: | | NO: | | NO: 2576 | | | |
| | 692 | | 1634 | | | | | |
| MA0693 | SEQ ID | CCCUGGACAUUCGAAUGGGCA | SEQ ID | CCCAUUCGAAUGUCCAGGGCG | SEQ ID | CCCUGGACAUUCGAAUGGG | 0.4911 | |
| | NO: | | NO: | | NO: 2577 | | | |
| | 693 | | 1635 | | | | | |
| MA0694 | SEQ ID | GGACAUUCGAAUGGGCACCCU | SEQ ID | GGUGCCCAUUCGAAUGUCCAG | SEQ ID | GGACAUUCGAAUGGGCACC | 0.5227 | * |
| | NO: | | NO: | | NO: 2578 | | | |
| | 694 | | 1636 | | | | | |
| MA0695 | SEQ ID | ACAUUCGAAUGGGCACCCUGA | SEQ ID | AGGGUGCCCAUUCGAAUGUCC | SEQ ID | ACAUUCGAAUGGGCACCCU | 0.5385 | * |
| | NO: | | NO: | | NO: 2579 | | | |
| | 695 | | 1637 | | | | | |
| MA0696 | SEQ ID | CAUUCGAAUGGGCACCCUGAA | SEQ ID | CAGGGUGCCCAUUCGAAUGUC | SEQ ID | CAUUCGAAUGGGCACCCUG | 0.2598 | |
| | NO: | | NO: | | NO: 2580 | | | |
| | 696 | | 1638 | | | | | |
| MA0697 | SEQ ID | AUUCGAAUGGGCACCCUGAAA | SEQ ID | UCAGGGUGCCCAUUCGAAUGU | SEQ ID | AUUCGAAUGGGCACCCUGA | 0.3436 | |
| | NO: | | NO: | | NO: 2581 | | | |
| | 697 | | 1639 | | | | | |
| MA0698 | SEQ ID | UUCGAAUGGGCACCCUGAAAA | SEQ ID | UUCAGGGUGCCCAUUCGAAUG | SEQ ID | UUCGAAUGGGCACCCUGAA | 0.3559 | |
| | NO: | | NO: | | NO: 2582 | | | |
| | 698 | | 1640 | | | | | |
| MA0699 | SEQ ID | UCGAAUGGGCACCCUGAAAAG | SEQ ID | UUUCAGGGUGCCCAUUCGAAU | SEQ ID | UCGAAUGGGCACCCUGAAA | 0.5967 | * |
| | NO: | | NO: | | NO: 2583 | | | |
| | 699 | | 1641 | | | | | |
| MA0700 | SEQ ID | CGAAUGGGCACCCUGAAAAGA | SEQ ID | UUUUCAGGGUGCCCAUUCGAA | SEQ ID | CGAAUGGGCACCCUGAAAA | 0.2110 | |
| | NO: | | NO: | | NO: 2584 | | | |
| | 700 | | 1642 | | | | | |
| MA0701 | SEQ ID | GAAUGGGCACCCUGAAAAGAC | SEQ ID | CUUUUCAGGGUGCCCAUUCGA | SEQ ID | GAAUGGGCACCCUGAAAAG | 0.2843 | |
| | NO: | | NO: | | NO: 2585 | | | |
| | 701 | | 1643 | | | | | |
| MA0702 | SEQ ID | UGGGCACCCUGAAAAGACUAU | SEQ ID | AGUCUUUUCAGGGUGCCCAUU | SEQ ID | UGGGCACCCUGAAAAGACU | 0.4177 | |
| | NO: | | NO: | | NO: 2586 | | | |
| | 702 | | 1644 | | | | | |
| MA0703 | SEQ ID | GGGCACCCUGAAAAGACUAUC | SEQ ID | UAGUCUUUUCAGGGUGCCCAU | SEQ ID | GGGCACCCUGAAAAGACUA | 0.4237 | |
| | NO: | | NO: | | NO: 2587 | | | |
| | 703 | | 1645 | | | | | |
| MA0704 | SEQ ID | GGCACCCUGAAAAGACUAUCA | SEQ ID | AUAGUCUUUUCAGGGUGCCCA | SEQ ID | GGCACCCUGAAAAGACUAU | 0.2539 | |
| | NO: | | NO: | | NO: 2588 | | | |
| | 704 | | 1646 | | | | | |

TABLE 1-17

| | | | | | | | rela- | |
|---|---|---|---|---|---|---|---|---|
| double | | | | | | | tive | |
| stranded | | | | | | | ex | |
| nucleic | | | | antisense strand | | | pres- | |
| acid | SEQ ID | sense strand sequence | SEQ ID | sequence | SEQ ID | target MASP2 | sion | |
| number | NO: | (5′--->3′) | NO: | (5′--->3′) | NO: | mRNA sequence | level | note |
| MA0705 | SEQ ID | GCACCCUGAAAAGACUAUCAC | SEQ ID | GAUAGUCUUUUCAGGGUGCCC | SEQ ID | GCACCCUGAAAAGACUAUC | 0.4681 | |
| | NO: | | NO: | | NO: 2589 | | | |
| | 705 | | 1647 | | | | | |
| MA0706 | SEQ ID | CACCCUGAAAAGACUAUCACC | SEQ ID | UGAUAGUCUUUUCAGGGUGCC | SEQ ID | CACCCUGAAAAGACUAUCA | 0.2546 | |
| | NO: | | NO: | | NO: 2590 | | | |
| | 706 | | 1648 | | | | | |
| MA0707 | SEQ ID | ACCCUGAAAAGACUAUCACCU | SEQ ID | GUGAUAGUCUUUUCAGGGUGC | SEQ ID | ACCCUGAAAAGACUAUCAC | 0.4901 | * |
| | NO: | | NO: | | NO: 2591 | | | |
| | 707 | | 1649 | | | | | |
| MA0708 | SEQ ID | CCCUGAAAAGACUAUCACCUC | SEQ ID | GGUGAUAGUCUUUUCAGGGUG | SEQ ID | CCCUGAAAAGACUAUCACC | 0.2992 | |
| | NO: | | NO: | | NO: 2592 | | | |
| | 708 | | 1650 | | | | | |
| MA0709 | SEQ ID | CCUGAAAAGACUAUCACCUCA | SEQ ID | AGGUGAUAGUCUUUUCAGGGU | SEQ ID | CCUGAAAAGACUAUCACCU | 0.1591 | |
| | NO: | | NO: | | NO: 2593 | | | |
| | 709 | | 1651 | | | | | |
| MA0710 | SEQ ID | CUGAAAAGACUAUCACCUCAU | SEQ ID | GAGGUGAUAGUCUUUUCAGGG | SEQ ID | CUGAAAAGACUAUCACCUC | 0.4286 | * |
| | NO: | | NO: | | NO: 2594 | | | |
| | 710 | | 1652 | | | | | |
| MA0711 | SEQ ID | UGAAAAGACUAUCACCUCAUU | SEQ ID | UGAGGUGAUAGUCUUUUCAGG | SEQ ID | UGAAAAGACUAUCACCUCA | 0.2791 | |
| | NO: | | NO: | | NO: 2595 | | | |
| | 711 | | 1653 | | | | | |
| MA0712 | SEQ ID | GAAAAGACUAUCACCUCAUUA | SEQ ID | AUGAGGUGAUAGUCUUUUCAG | SEQ ID | GAAAAGACUAUCACCUCAU | 0.5838 | * |
| | NO: | | NO: | | NO: 2596 | | | |
| | 712 | | 1654 | | | | | |
| MA0713 | SEQ ID | AAGACUAUCACCUCAUUAUAC | SEQ ID | AUAAUGAGGUGAUAGUCUUUU | SEQ ID | AAGACUAUCACCUCAUUAU | 0.3405 | |
| | NO: | | NO: | | NO: 2597 | | | |
| | 713 | | 1655 | | | | | |
| MA0714 | SEQ ID | AGACUAUCACCUCAUUAUACA | SEQ ID | UAUAAUGAGGUGAUAGUCUUU | SEQ ID | AGACUAUCACCUCAUUAUA | 0.1884 | |
| | NO: | | NO: | | NO: 2598 | | | |
| | 714 | | 1656 | | | | | |
| MA0715 | SEQ ID | GACUAUCACCUCAUUAUACAC | SEQ ID | GUAUAAUGAGGUGAUAGUCUU | SEQ ID | GACUAUCACCUCAUUAUAC | 0.4534 | |
| | NO: | | NO: | | NO: 2599 | | | |
| | 715 | | 1657 | | | | | |
| MA0716 | SEQ ID | ACUAUCACCUCAUUAUACACA | SEQ ID | UGUAUAAUGAGGUGAUAGUCU | SEQ ID | ACUAUCACCUCAUUAUACA | 0.1301 | |
| | NO: | | NO: | | NO: 2600 | | | |
| | 716 | | 1658 | | | | | |
| MA0717 | SEQ ID | CUAUCACCUCAUUAUACACAA | SEQ ID | GUGUAUAAUGAGGUGAUAGUC | SEQ ID | CUAUCACCUCAUUAUACAC | 0.1852 | |
| | NO: | | NO: | | NO: 2601 | | | |
| | 717 | | 1659 | | | | | |
| MA0718 | SEQ ID | AUCACCUCAUUAUACACAAGC | SEQ ID | UUGUGUAUAAUGAGGUGAUAG | SEQ ID | AUCACCUCAUUAUACACAA | 0.5239 | |
| | NO: | | NO: | | NO: 2602 | | | |
| | 718 | | 1660 | | | | | |
| MA0719 | SEQ ID | UCACCUCAUUAUACACAAGCC | SEQ ID | CUUGUGUAUAAUGAGGUGAUA | SEQ ID | UCACCUCAUUAUACACAAG | 0.5667 | |
| | NO: | | NO: | | NO: 2603 | | | |
| | 719 | | 1661 | | | | | |
| MA0720 | SEQ ID | ACCUCAUUAUACACAAGCCUG | SEQ ID | GGCUUGUGUAUAAUGAGGUGA | SEQ ID | ACCUCAUUAUACACAAGCC | 0.3569 | |
| | NO: | | NO: | | NO: 2604 | | | |
| | 720 | | 1662 | | | | | |
| MA0721 | SEQ ID | CCUCAUUAUACACAAGCCUGG | SEQ ID | AGGCUUGUGUAUAAUGAGGUG | SEQ ID | CCUCAUUAUACACAAGCCU | 0.4619 | * |
| | NO: | | NO: | | NO: 2605 | | | |
| | 721 | | 1663 | | | | | |
| MA0722 | SEQ ID | CUCAUUAUACACAAGCCUGGU | SEQ ID | CAGGCUUGUGUAUAAUGAGGU | SEQ ID | CUCAUUAUACACAAGCCUG | 0.1992 | |
| | NO: | | NO: | | NO: 2606 | | | |
| | 722 | | 1664 | | | | | |
| MA0723 | SEQ ID | UCAUUAUACACAAGCCUGGUC | SEQ ID | CCAGGCUUGUGUAUAAUGAGG | SEQ ID | UCAUUAUACACAAGCCUGG | 0.5752 | * |
| | NO: | | NO: | | NO: 2607 | | | |
| | 723 | | 1665 | | | | | |
| MA0724 | SEQ ID | CAUUAUACACAAGCCUGGUCU | SEQ ID | ACCAGGCUUGUGUAUAAUGAG | SEQ ID | CAUUAUACACAAGCCUGGU | 0.3232 | |
| | NO: | | NO: | | NO: 2608 | | | |
| | 724 | | 1666 | | | | | |
| MA0725 | SEQ ID | AUUAUACACAAGCCUGGUCUG | SEQ ID | GACCAGGCUUGUGUAUAAUGA | SEQ ID | AUUAUACACAAGCCUGGUC | 0.5738 | * |
| | NO: | | NO: | | NO: 2609 | | | |
| | 725 | | 1667 | | | | | |
| MA0726 | SEQ ID | UUAUACACAAGCCUGGUCUGA | SEQ ID | AGACCAGGCUUGUGUAUAAUG | SEQ ID | UUAUACACAAGCCUGGUCU | 0.5138 | * |
| | NO: | | NO: | | NO: 2610 | | | |
| | 726 | | 1668 | | | | | |
| MA0727 | SEQ ID | UAUACACAAGCCUGGUCUGAA | SEQ ID | CAGACCAGGCUUGUGUAUAAU | SEQ ID | UAUACACAAGCCUGGUCUG | 0.3517 | |
| | NO: | | NO: | | NO: 2611 | | | |
| | 727 | | 1669 | | | | | |
| MA0728 | SEQ ID | AUACACAAGCCUGGUCUGAAG | SEQ ID | UCAGACCAGGCUUGUGUAUAA | SEQ ID | AUACACAAGCCUGGUCUGA | 0.2272 | |
| | NO: | | NO: | | NO: 2612 | | | |
| | 728 | | 1670 | | | | | |
| MA0729 | SEQ ID | UACACAAGCCUGGUCUGAAGC | SEQ ID | UUCAGACCAGGCUUGUGUAUA | SEQ ID | UACACAAGCCUGGUCUGAA | 0.3259 | |
| | NO: | | NO: | | NO: 2613 | | | |
| | 729 | | 1671 | | | | | |
| MA0730 | SEQ ID | ACACAAGCCUGGUCUGAAGCU | SEQ ID | CUUCAGACCAGGCUUGUGUAU | SEQ ID | ACACAAGCCUGGUCUGAAG | 0.3315 | |
| | NO: | | NO: | | NO: 2614 | | | |
| | 730 | | 1672 | | | | | |
| MA0731 | SEQ ID | CACAAGCCUGGUCUGAAGCUG | SEQ ID | GCUUCAGACCAGGCUUGUGUA | SEQ ID | CACAAGCCUGGUCUGAAGC | 0.3870 | |
| | NO: | | NO: | | NO: 2615 | | | |
| | 731 | | 1673 | | | | | |
| MA0732 | SEQ ID | ACAAGCCUGGUCUGAAGCUGU | SEQ ID | AGCUUCAGACCAGGCUUGUGU | SEQ ID | ACAAGCCUGGUCUGAAGCU | 0.4855 | * |
| | NO: | | NO: | | NO: 2616 | | | |
| | 732 | | 1674 | | | | | |
| MA0733 | SEQ ID | CAAGCCUGGUCUGAAGCUGUU | SEQ ID | CAGCUUCAGACCAGGCUUGUG | SEQ ID | CAAGCCUGGUCUGAAGCUG | 0.3114 | |
| | NO: | | NO: | | NO: 2617 | | | |
| | 733 | | 1675 | | | | | |
| MA0734 | SEQ ID | AAGCCUGGUCUGAAGCUGUUU | SEQ ID | ACAGCUUCAGACCAGGCUUGU | SEQ ID | AAGCCUGGUCUGAAGCUGU | 0.3144 | |
| | NO: | | NO: | | NO: 2618 | | | |
| | 734 | | 1676 | | | | | |
| MA0735 | SEQ ID | AGCCUGGUCUGAAGCUGUUUU | SEQ ID | AACAGCUUCAGACCAGGCUUG | SEQ ID | AGCCUGGUCUGAAGCUGUU | 0.3286 | |
| | NO: | | NO: | | NO: 2619 | | | |
| | 735 | | 1677 | | | | | |
| MA0736 | SEQ ID | GCCUGGUCUGAAGCUGUUUUU | SEQ ID | AAACAGCUUCAGACCAGGCUU | SEQ ID | GCCUGGUCUGAAGCUGUUU | 0.5949 | * |
| | NO: | | NO: | | NO: 2620 | | | |
| | 736 | | 1678 | | | | | |
| MA0737 | SEQ ID | CCUGGUCUGAAGCUGUUUUUA | SEQ ID | AAAACAGCUUCAGACCAGGCU | SEQ ID | CCUGGUCUGAAGCUGUUUU | 0.5426 | * |
| | NO: | | NO: | | NO: 2621 | | | |
| | 737 | | 1679 | | | | | |
| MA0738 | SEQ ID | CUGGUCUGAAGCUGUUUUUAU | SEQ ID | AAAAACAGCUUCAGACCAGGC | SEQ ID | CUGGUCUGAAGCUGUUUUU | 0.2070 | |
| | NO: | | NO: | | NO: 2622 | | | |
| | 738 | | 1680 | | | | | |
| MA0739 | SEQ ID | UGGUCUGAAGCUGUUUUUAUA | SEQ ID | UAAAAACAGCUUCAGACCAGG | SEQ ID | UGGUCUGAAGCUGUUUUUA | 0.2202 | |
| | NO: | | NO: | | NO: 2623 | | | |
| | 739 | | 1681 | | | | | |
| MA0740 | SEQ ID | GGUCUGAAGCUGUUUUUAUAC | SEQ ID | AUAAAAACAGCUUCAGACCAG | SEQ ID | GGUCUGAAGCUGUUUUUAU | 0.3214 | |
| | NO: | | NO: | | NO: 2624 | | | |
| | 740 | | 1682 | | | | | |
| MA0741 | SEQ ID | GUCUGAAGCUGUUUUUAUACA | SEQ ID | UAUAAAAACAGCUUCAGACCA | SEQ ID | GUCUGAAGCUGUUUUUAUA | 0.1678 | |
| | NO: | | NO: | | NO: 2625 | | | |
| | 741 | | 1683 | | | | | |
| MA0742 | SEQ ID | CUGAAGCUGUUUUUAUACAUG | SEQ ID | UGUAUAAAAACAGCUUCAGAC | SEQ ID | CUGAAGCUGUUUUUAUACA | 0.2003 | |
| | NO: | | NO: | | NO: 2626 | | | |
| | 742 | | 1684 | | | | | |
| MA0743 | SEQ ID | UGAAGCUGUUUUUAUACAUGA | SEQ ID | AUGUAUAAAAACAGCUUCAGA | SEQ ID | UGAAGCUGUUUUUAUACAU | 0.4078 | |
| | NO: | | NO: | | NO: 2627 | | | |
| | 743 | | 1685 | | | | | |
| MA0744 | SEQ ID | GAAGCUGUUUUUAUACAUGAA | SEQ ID | CAUGUAUAAAAACAGCUUCAG | SEQ ID | GAAGCUGUUUUUAUACAUG | 0.3181 | |
| | NO: | | NO: | | NO: 2628 | | | |
| | 744 | | 1686 | | | | | |
| MA0745 | SEQ ID | AAGCUGUUUUUAUACAUGAAG | SEQ ID | UCAUGUAUAAAAACAGCUUCA | SEQ ID | AAGCUGUUUUUAUACAUGA | 0.3278 | |
| | NO: | | NO: | | NO: 2629 | | | |
| | 745 | | 1687 | | | | | |
| MA0746 | SEQ ID | UUUUAUACAUGAAGGUUAUAC | SEQ ID | AUAACCUUCAUGUAUAAAAAC | SEQ ID | UUUUAUACAUGAAGGUUAU | 0.4180 | |
| | NO: | | NO: | | NO: 2630 | | | |
| | 746 | | 1688 | | | | | |
| MA0747 | SEQ ID | UAUACAUGAAGGUUAUACUCA | SEQ ID | AGUAUAACCUUCAUGUAUAAA | SEQ ID | UAUACAUGAAGGUUAUACU | 0.5284 | * |
| | NO: | | NO: | | NO: 2631 | | | |
| | 747 | | 1689 | | | | | |
| MA0748 | SEQ ID | ACAUGAAGGUUAUACUCAUGA | SEQ ID | AUGAGUAUAACCUUCAUGUAU | SEQ ID | ACAUGAAGGUUAUACUCAU | 0.2583 | |
| | NO: | | NO: | | NO: 2632 | | | |
| | 748 | | 1690 | | | | | |

TABLE 1-18

| | | | | | | | rela- | |
|---|---|---|---|---|---|---|---|---|
| double | | | | | | | tive | |
| stranded | | | | | | | ex- | |
| nucleic | | | | antisense strand | | | pres- | |
| acid | SEQ ID | sense strand sequence | SEQ ID | sequence | SEQ ID | target MASP2 | sion | |
| number | NO: | (5′--->3′) | NO: | (5′--->3′) | NO: | mRNA sequence | level | note |
| MA0749 | SEQ ID | UGAAGGUUAUACUCAUGAUGC | SEQ ID | AUCAUGAGUAUAACCUUCAUG | SEQ ID | UGAAGGUUAUACUCAUGAU | 0.4428 | |
| | NO: | | NO: | | NO: 2633 | | | |
| | 749 | | 1691 | | | | | |
| MA0750 | SEQ ID | GAAGGUUAUACUCAUGAUGCU | SEQ ID | CAUCAUGAGUAUAACCUUCAU | SEQ ID | GAAGGUUAUACUCAUGAUG | 0.5120 | * |
| | NO: | | NO: | | NO: 2634 | | | |
| | 750 | | 1692 | | | | | |
| MA0751 | SEQ ID | AGGUUAUACUCAUGAUGCUGG | SEQ ID | AGCAUCAUGAGUAUAACCUUC | SEQ ID | AGGUUAUACUCAUGAUGCU | 0.3862 | |
| | NO: | | NO: | | NO: 2635 | | | |
| | 751 | | 1693 | | | | | |
| MA0752 | SEQ ID | GUUAUACUCAUGAUGCUGGCU | SEQ ID | CCAGCAUCAUGAGUAUAACCU | SEQ ID | GUUAUACUCAUGAUGCUGG | 0.5673 | * |
| | NO: | | NO: | | NO: 2636 | | | |
| | 752 | | 1694 | | | | | |
| MA0753 | SEQ ID | UACUCAUGAUGCUGGCUUUGA | SEQ ID | AAAGCCAGCAUCAUGAGUAUA | SEQ ID | UACUCAUGAUGCUGGCUUU | 0.5018 | |
| | NO: | | NO: | | NO: 2637 | | | |
| | 753 | | 1695 | | | | | |
| MA0754 | SEQ ID | ACUCAUGAUGCUGGCUUUGAC | SEQ ID | CAAAGCCAGCAUCAUGAGUAU | SEQ ID | ACUCAUGAUGCUGGCUUUG | 0.4341 | * |
| | NO: | | NO: | | NO: 2638 | | | |
| | 754 | | 1696 | | | | | |
| MA0755 | SEQ ID | CUCAUGAUGCUGGCUUUGACA | SEQ ID | UCAAAGCCAGCAUCAUGAGUA | SEQ ID | CUCAUGAUGCUGGCUUUGA | 0.2301 | |
| | NO: | | NO: | | NO: 2639 | | | |
| | 755 | | 1697 | | | | | |
| MA0756 | SEQ ID | UCAUGAUGCUGGCUUUGACAA | SEQ ID | GUCAAAGCCAGCAUCAUGAGU | SEQ ID | UCAUGAUGCUGGCUUUGAC | 0.5801 | * |
| | NO: | | NO: | | NO: 2640 | | | |
| | 756 | | 1698 | | | | | |
| MA0757 | SEQ ID | CAUGAUGCUGGCUUUGACAAU | SEQ ID | UGUCAAAGCCAGCAUCAUGAG | SEQ ID | CAUGAUGCUGGCUUUGACA | 0.2522 | |
| | NO: | | NO: | | NO: 2641 | | | |
| | 757 | | 1699 | | | | | |
| MA0758 | SEQ ID | AUGAUGCUGGCUUUGACAAUG | SEQ ID | UUGUCAAAGCCAGCAUCAUGA | SEQ ID | AUGAUGCUGGCUUUGACAA | 0.1982 | |
| | NO: | | NO: | | NO: 2642 | | | |
| | 758 | | 1700 | | | | | |
| MA0759 | SEQ ID | UGAUGCUGGCUUUGACAAUGA | SEQ ID | AUUGUCAAAGCCAGCAUCAUG | SEQ ID | UGAUGCUGGCUUUGACAAU | 0.3565 | |
| | NO: | | NO: | | NO: 2643 | | | |
| | 759 | | 1701 | | | | | |
| MA0760 | SEQ ID | GAUGCUGGCUUUGACAAUGAC | SEQ ID | CAUUGUCAAAGCCAGCAUCAU | SEQ ID | GAUGCUGGCUUUGACAAUG | 0.0781 | |
| | NO: | | NO: | | NO: 2644 | | | |
| | 760 | | 1702 | | | | | |
| MA0761 | SEQ ID | AUGCUGGCUUUGACAAUGACA | SEQ ID | UCAUUGUCAAAGCCAGCAUCA | SEQ ID | AUGCUGGCUUUGACAAUGA | 0.2048 | |
| | NO: | | NO: | | NO: 2645 | | | |
| | 761 | | 1703 | | | | | |
| MA0762 | SEQ ID | GCUGGCUUUGACAAUGACAUA | SEQ ID | UGUCAUUGUCAAAGCCAGCAU | SEQ ID | GCUGGCUUUGACAAUGACA | 0.2943 | |
| | NO: | | NO: | | NO: 2646 | | | |
| | 762 | | 1704 | | | | | |
| MA0763 | SEQ ID | CUGGCUUUGACAAUGACAUAG | SEQ ID | AUGUCAUUGUCAAAGCCAGCA | SEQ ID | CUGGCUUUGACAAUGACAU | 0.1290 | |
| | NO: | | NO: | | NO: 2647 | | | |
| | 763 | | 1705 | | | | | |
| MA0764 | SEQ ID | UGGCUUUGACAAUGACAUAGC | SEQ ID | UAUGUCAUUGUCAAAGCCAGC | SEQ ID | UGGCUUUGACAAUGACAUA | 0.4822 | |
| | NO: | | NO: | | NO: 2648 | | | |
| | 764 | | 1706 | | | | | |
| MA0765 | SEQ ID | GGCUUUGACAAUGACAUAGCA | SEQ ID | CUAUGUCAUUGUCAAAGCCAG | SEQ ID | GGCUUUGACAAUGACAUAG | 0.2661 | |
| | NO: | | NO: | | NO: 2649 | | | |
| | 765 | | 1707 | | | | | |
| MA0766 | SEQ ID | GCUUUGACAAUGACAUAGCAC | SEQ ID | GCUAUGUCAUUGUCAAAGCCA | SEQ ID | GCUUUGACAAUGACAUAGC | 0.3189 | |
| | NO: | | NO: | | NO: 2650 | | | |
| | 766 | | 1708 | | | | | |
| MA0767 | SEQ ID | CUUUGACAAUGACAUAGCACU | SEQ ID | UGCUAUGUCAUUGUCAAAGCC | SEQ ID | CUUUGACAAUGACAUAGCA | 0.2030 | |
| | NO: | | NO: | | NO: 2651 | | | |
| | 767 | | 1709 | | | | | |
| MA0768 | SEQ ID | UUGACAAUGACAUAGCACUGA | SEQ ID | AGUGCUAUGUCAUUGUCAAAG | SEQ ID | UUGACAAUGACAUAGCACU | 0.5830 | * |
| | NO: | | NO: | | NO: 2652 | | | |
| | 768 | | 1710 | | | | | |
| MA0769 | SEQ ID | GACAAUGACAUAGCACUGAUU | SEQ ID | UCAGUGCUAUGUCAUUGUCAA | SEQ ID | GACAAUGACAUAGCACUGA | 0.2930 | |
| | NO: | | NO: | | NO: 2653 | | | |
| | 769 | | 1711 | | | | | |
| MA0770 | SEQ ID | ACAAUGACAUAGCACUGAUUA | SEQ ID | AUCAGUGCUAUGUCAUUGUCA | SEQ ID | ACAAUGACAUAGCACUGAU | 0.1669 | |
| | NO: | | NO: | | NO: 2654 | | | |
| | 770 | | 1712 | | | | | |
| MA0771 | SEQ ID | CAAUGACAUAGCACUGAUUAA | SEQ ID | AAUCAGUGCUAUGUCAUUGUC | SEQ ID | CAAUGACAUAGCACUGAUU | 0.2136 | |
| | NO: | | NO: | | NO: 2655 | | | |
| | 771 | | 1713 | | | | | |
| MA0772 | SEQ ID | AAUGACAUAGCACUGAUUAAA | SEQ ID | UAAUCAGUGCUAUGUCAUUGU | SEQ ID | AAUGACAUAGCACUGAUUA | 0.3583 | |
| | NO: | | NO: | | NO: 2656 | | | |
| | 772 | | 1714 | | | | | |
| MA0773 | SEQ ID | AUGACAUAGCACUGAUUAAAU | SEQ ID | UUAAUCAGUGCUAUGUCAUUG | SEQ ID | AUGACAUAGCACUGAUUAA | 0.1389 | |
| | NO: | | NO: | | NO: 2657 | | | |
| | 773 | | 1715 | | | | | |
| MA0774 | SEQ ID | UGACAUAGCACUGAUUAAAUU | SEQ ID | UUUAAUCAGUGCUAUGUCAUU | SEQ ID | UGACAUAGCACUGAUUAAA | 0.1580 | |
| | NO: | | NO: | | NO: 2658 | | | |
| | 774 | | 1716 | | | | | |
| MA0775 | SEQ ID | GACAUAGCACUGAUUAAAUUG | SEQ ID | AUUUAAUCAGUGCUAUGUCAU | SEQ ID | GACAUAGCACUGAUUAAAU | 0.1395 | |
| | NO: | | NO: | | NO: 2659 | | | |
| | 775 | | 1717 | | | | | |
| MA0776 | SEQ ID | ACAUAGCACUGAUUAAAUUGA | SEQ ID | AAUUUAAUCAGUGCUAUGUCA | SEQ ID | ACAUAGCACUGAUUAAAUU | 0.3979 | |
| | NO: | | NO: | | NO: 2660 | | | |
| | 776 | | 1718 | | | | | |
| MA0777 | SEQ ID | CAUAGCACUGAUUAAAUUGAA | SEQ ID | CAAUUUAAUCAGUGCUAUGUC | SEQ ID | CAUAGCACUGAUUAAAUUG | 0.2916 | |
| | NO: | | NO: | | NO: 2661 | | | |
| | 777 | | 1719 | | | | | |
| MA0778 | SEQ ID | AUAGCACUGAUUAAAUUGAAU | SEQ ID | UCAAUUUAAUCAGUGCUAUGU | SEQ ID | AUAGCACUGAUUAAAUUGA | 0.4196 | |
| | NO: | | NO: | | NO: 2662 | | | |
| | 778 | | 1720 | | | | | |
| MA0779 | SEQ ID | UAGCACUGAUUAAAUUGAAUA | SEQ ID | UUCAAUUUAAUCAGUGCUAUG | SEQ ID | UAGCACUGAUUAAAUUGAA | 0.3348 | |
| | NO: | | NO: | | NO: 2663 | | | |
| | 779 | | 1721 | | | | | |
| MA0780 | SEQ ID | AGCACUGAUUAAAUUGAAUAA | SEQ ID | AUUCAAUUUAAUCAGUGCUAU | SEQ ID | AGCACUGAUUAAAUUGAAU | 0.3641 | |
| | NO: | | NO: | | NO: 2664 | | | |
| | 780 | | 1722 | | | | | |
| MA0781 | SEQ ID | GCACUGAUUAAAUUGAAUAAC | SEQ ID | UAUUCAAUUUAAUCAGUGCUA | SEQ ID | GCACUGAUUAAAUUGAAUA | 0.2676 | |
| | NO: | | NO: | | NO: 2665 | | | |
| | 781 | | 1723 | | | | | |
| MA0782 | SEQ ID | CACUGAUUAAAUUGAAUAACA | SEQ ID | UUAUUCAAUUUAAUCAGUGCU | SEQ ID | CACUGAUUAAAUUGAAUAA | 0.2343 | |
| | NO: | | NO: | | NO: 2666 | | | |
| | 782 | | 1724 | | | | | |
| MA0783 | SEQ ID | CUGAUUAAAUUGAAUAACAAA | SEQ ID | UGUUAUUCAAUUUAAUCAGUG | SEQ ID | CUGAUUAAAUUGAAUAACA | 0.1117 | |
| | NO: | | NO: | | NO: 2667 | | | |
| | 783 | | 1725 | | | | | |
| MA0784 | SEQ ID | UGAUUAAAUUGAAUAACAAAG | SEQ ID | UUGUUAUUCAAUUUAAUCAGU | SEQ ID | UGAUUAAAUUGAAUAACAA | 0.2792 | |
| | NO: | | NO: | | NO: 2668 | | | |
| | 784 | | 1726 | | | | | |
| MA0785 | SEQ ID | GAUUAAAUUGAAUAACAAAGU | SEQ ID | UUUGUUAUUCAAUUUAAUCAG | SEQ ID | GAUUAAAUUGAAUAACAAA | 0.2171 | |
| | NO: | | NO: | | NO: 2669 | | | |
| | 785 | | 1727 | | | | | |
| MA0786 | SEQ ID | AAUUGAAUAACAAAGUUGUAA | SEQ ID | ACAACUUUGUUAUUCAAUUUA | SEQ ID | AAUUGAAUAACAAAGUUGU | 0.5295 | * |
| | NO: | | NO: | | NO: 2670 | | | |
| | 786 | | 1728 | | | | | |
| MA0787 | SEQ ID | AAUAACAAAGUUGUAAUCAAU | SEQ ID | UGAUUACAACUUUGUUAUUCA | SEQ ID | AAUAACAAAGUUGUAAUCA | 0.4232 | |
| | NO:7 | | NO: | | NO: 2671 | | | |
| | 78 | | 1729 | | | | | |
| MA0788 | SEQ ID | AUAACAAAGUUGUAAUCAAUA | SEQ ID | UUGAUUACAACUUUGUUAUUC | SEQ ID | AUAACAAAGUUGUAAUCAA | 0.2156 | |
| | NO: | | NO: | | NO: 2672 | | | |
| | 788 | | 1730 | | | | | |
| MA0789 | SEQ ID | UAACAAAGUUGUAAUCAAUAG | SEQ ID | AUUGAUUACAACUUUGUUAUU | SEQ ID | UAACAAAGUUGUAAUCAAU | 0.4481 | |
| | NO: | | NO: | | NO: 2673 | | | |
| | 789 | | 1731 | | | | | |
| MA0790 | SEQ ID | AACAAAGUUGUAAUCAAUAGC | SEQ ID | UAUUGAUUACAACUUUGUUAU | SEQ ID | AACAAAGUUGUAAUCAAUA | 0.5348 | * |
| | NO: | | NO: | | NO: 2674 | | | |
| | 790 | | 1732 | | | | | |
| MA0791 | SEQ ID | AAGUUGUAAUCAAUAGCAACA | SEQ ID | UUGCUAUUGAUUACAACUUUG | SEQ ID | AAGUUGUAAUCAAUAGCAA | 0.5833 | * |
| | NO: | | NO: | | NO: 2675 | | | |
| | 791 | | 1733 | | | | | |
| MA0792 | SEQ ID | GUUGUAAUCAAUAGCAACAUC | SEQ ID | UGUUGCUAUUGAUUACAACUU | SEQ ID | GUUGUAAUCAAUAGCAACA | 0.2408 | |
| | NO: | | NO: | | NO: 2676 | | | |
| | 792 | | 1734 | | | | | |

TABLE 1-19

| | | | | | | | rela- | |
|---|---|---|---|---|---|---|---|---|
| double | | | | | | | tive | |
| stranded | | | | | | | ex- | |
| nucleic | | | | antisense strand | | | pres- | |
| acid | SEQ ID | sense strand sequence | SEQ ID | sequence | SEQ ID | target MASP2 | sion | |
| number | NO: | (5′--->3′) | NO: | (5′--->3′) | NO: | mRNA sequence | level | note |
| MA0793 | SEQ ID | GUAAUCAAUAGCAACAUCACG | SEQ ID | UGAUGUUGCUAUUGAUUACAA | SEQ ID | GUAAUCAAUAGCAACAUCA | 0.5308 | * |
| | NO: | | NO: | | NO: 2677 | | | |
| | 793 | | 1735 | | | | | |
| MA0794 | SEQ ID | AAUCAAUAGCAACAUCACGCC | SEQ ID | CGUGAUGUUGCUAUUGAUUAC | SEQ ID | AAUCAAUAGCAACAUCACG | 0.5752 | * |
| | NO: | | NO: | | NO: 2678 | | | |
| | 794 | | 1736 | | | | | |
| MA0795 | SEQ ID | CUAUUUGUCUGCCAAGAAAAG | SEQ ID | UUUCUUGGCAGACAAAUAGGC | SEQ ID | CUAUUUGUCUGCCAAGAAA | 0.4156 | |
| | NO: | | NO: | | NO: 2679 | | | |
| | 795 | | 1737 | | | | | |
| MA0796 | SEQ ID | UAUUUGUCUGCCAAGAAAAGA | SEQ ID | UUUUCUUGGCAGACAAAUAGG | SEQ ID | UAUUUGUCUGCCAAGAAAA | 0.2340 | |
| | NO: | | NO: | | NO: 2680 | | | |
| | 796 | | 1738 | | | | | |
| MA0797 | SEQ ID | AUUUGUCUGCCAAGAAAAGAA | SEQ ID | CUUUUCUUGGCAGACAAAUAG | SEQ ID | AUUUGUCUGCCAAGAAAAG | 0.3825 | |
| | NO: | | NO: | | NO: 2681 | | | |
| | 797 | | 1739 | | | | | |
| MA0798 | SEQ ID | UGCCAAGAAAAGAAGCUGAAU | SEQ ID | UCAGCUUCUUUUCUUGGCAGA | SEQ ID | UGCCAAGAAAAGAAGCUGA | 0.5997 | * |
| | NO: | | NO: | | NO: 2682 | | | |
| | 798 | | 1740 | | | | | |
| MA0799 | SEQ ID | CCAAGAAAAGAAGCUGAAUCC | SEQ ID | AUUCAGCUUCUUUUCUUGGCA | SEQ ID | CCAAGAAAAGAAGCUGAAU | 0.4103 | |
| | NO: | | NO: | | NO: 2683 | | | |
| | 799 | | 1741 | | | | | |
| MA0800 | SEQ ID | GAAGCUGAAUCCUUUAUGAGG | SEQ ID | UCAUAAAGGAUUCAGCUUCUU | SEQ ID | GAAGCUGAAUCCUUUAUGA | 0.2991 | |
| | NO: | | NO: | | NO: 2684 | | | |
| | 800 | | 1742 | | | | | |
| MA0801 | SEQ ID | GCUGAAUCCUUUAUGAGGACA | SEQ ID | UCCUCAUAAAGGAUUCAGCUU | SEQ ID | GCUGAAUCCUUUAUGAGGA | 0.5691 | * |
| | NO: | | NO: | | NO: 2685 | | | |
| | 801 | | 1743 | | | | | |
| MA0802 | SEQ ID | CUGAAUCCUUUAUGAGGACAG | SEQ ID | GUCCUCAUAAAGGAUUCAGCU | SEQ ID | CUGAAUCCUUUAUGAGGAC | 0.5511 | * |
| | NO: | | NO: | | NO: 2686 | | | |
| | 802 | | 1744 | | | | | |
| MA0803 | SEQ ID | AGGACAGAUGACAUUGGAACU | SEQ ID | UUCCAAUGUCAUCUGUCCUCA | SEQ ID | AGGACAGAUGACAUUGGAA | 0.4492 | * |
| | NO: | | NO: | | NO: 2687 | | | |
| | 803 | | 1745 | | | | | |
| MA0804 | SEQ ID | GGACAGAUGACAUUGGAACUG | SEQ ID | GUUCCAAUGUCAUCUGUCCUC | SEQ ID | GGACAGAUGACAUUGGAAC | 0.5747 | |
| | NO: | | NO: | | NO: 2688 | | | |
| | 804 | | 1746 | | | | | |
| MA0805 | SEQ ID | CAUUGGAACUGCAUCUGGAUG | SEQ ID | UCCAGAUGCAGUUCCAAUGUC | SEQ ID | CAUUGGAACUGCAUCUGGA | 0.4047 | |
| | NO: | | NO: | | NO: 2689 | | | |
| | 805 | | 1747 | | | | | |
| MA0806 | SEQ ID | AACUGCAUCUGGAUGGGGAUU | SEQ ID | UCCCCAUCCAGAUGCAGUUCC | SEQ ID | AACUGCAUCUGGAUGGGGA | 0.5476 | * |
| | NO: | | NO: | | NO: 2690 | | | |
| | 806 | | 1748 | | | | | |
| MA0807 | SEQ ID | CUGCAUCUGGAUGGGGAUUAA | SEQ ID | AAUCCCCAUCCAGAUGCAGUU | SEQ ID | CUGCAUCUGGAUGGGGAUU | 0.4427 | |
| | NO: | | NO: | | NO: 2691 | | | |
| | 807 | | 1749 | | | | | |
| MA0808 | SEQ ID | GGAUGGGGAUUAACCCAAAGG | SEQ ID | UUUGGGUUAAUCCCCAUCCAG | SEQ ID | GGAUGGGGAUUAACCCAAA | 0.3251 | |
| | NO: | | NO: | | NO: 2692 | | | |
| | 808 | | 1750 | | | | | |
| MA0809 | SEQ ID | GGGGUUUUCUUGCUAGAAAUC | SEQ ID | UUUCUAGCAAGAAAACCCCUU | SEQ ID | GGGGUUUUCUUGCUAGAAA | 0.5848 | * |
| | NO: | | NO: | | NO: 2693 | | | |
| | 809 | | 1751 | | | | | |
| MA0810 | SEQ ID | GGGUUUUCUUGCUAGAAAUCU | SEQ ID | AUUUCUAGCAAGAAAACCCCU | SEQ ID | GGGUUUUCUUGCUAGAAAU | 0.5307 | * |
| | NO: | | NO: | | NO: 2694 | | | |
| | 810 | | 1752 | | | | | |
| MA0811 | SEQ ID | GGUUUUCUUGCUAGAAAUCUA | SEQ ID | GAUUUCUAGCAAGAAAACCCC | SEQ ID | GGUUUUCUUGCUAGAAAUC | 0.5842 | |
| | NO: | | NO: | | NO: 2695 | | | |
| | 811 | | 1753 | | | | | |
| MA0812 | SEQ ID | GUUUUCUUGCUAGAAAUCUAA | SEQ ID | AGAUUUCUAGCAAGAAAACCC | SEQ ID | GUUUUCUUGCUAGAAAUCU | 0.5979 | * |
| | NO: | | NO: | | NO: 2696 | | | |
| | 812 | | 1754 | | | | | |
| MA0813 | SEQ ID | UUUUCUUGCUAGAAAUCUAAU | SEQ ID | UAGAUUUCUAGCAAGAAAACC | SEQ ID | UUUUCUUGCUAGAAAUCUA | 0.3900 | |
| | NO: | | NO: | | NO: 2697 | | | |
| | 813 | | 1755 | | | | | |
| MA0814 | SEQ ID | UUUCUUGCUAGAAAUCUAAUG | SEQ ID | UUAGAUUUCUAGCAAGAAAAC | SEQ ID | UUUCUUGCUAGAAAUCUAA | 0.3701 | |
| | NO: | | NO: | | NO: 2698 | | | |
| | 814 | | 1756 | | | | | |
| MA0815 | SEQ ID | CUUGCUAGAAAUCUAAUGUAU | SEQ ID | ACAUUAGAUUUCUAGCAAGAA | SEQ ID | CUUGCUAGAAAUCUAAUGU | 0.5529 | * |
| | NO: | | NO: | | NO: 2699 | | | |
| | 815 | | 1757 | | | | | |
| MA0816 | SEQ ID | UUGCUAGAAAUCUAAUGUAUG | SEQ ID | UACAUUAGAUUUCUAGCAAGA | SEQ ID | UUGCUAGAAAUCUAAUGUA | 0.4379 | |
| | NO: | | NO: | | NO: 2700 | | | |
| | 816 | | 1758 | | | | | |
| MA0817 | SEQ ID | UGCUAGAAAUCUAAUGUAUGU | SEQ ID | AUACAUUAGAUUUCUAGCAAG | SEQ ID | UGCUAGAAAUCUAAUGUAU | 0.4668 | * |
| | NO: | | NO: | | NO: 2701 | | | |
| | 817 | | 1759 | | | | | |
| MA0818 | SEQ ID | AUCUAAUGUAUGUCGACAUAC | SEQ ID | AUGUCGACAUACAUUAGAUUU | SEQ ID | AUCUAAUGUAUGUCGACAU | 0.5457 | * |
| | NO: | | NO: | | NO: 2702 | | | |
| | 818 | | 1760 | | | | | |
| MA0819 | SEQ ID | UCUAAUGUAUGUCGACAUACC | SEQ ID | UAUGUCGACAUACAUUAGAUU | SEQ ID | UCUAAUGUAUGUCGACAUA | 0.5453 | |
| | NO: | | NO: | | NO: 2703 | | | |
| | 819 | | 1761 | | | | | |
| MA0820 | SEQ ID | UAAUGUAUGUCGACAUACCGA | SEQ ID | GGUAUGUCGACAUACAUUAGA | SEQ ID | UAAUGUAUGUCGACAUACC | 0.5130 | * |
| | NO: | | NO: | | NO: 2704 | | | |
| | 820 | | 1762 | | | | | |
| MA0821 | SEQ ID | AUGUAUGUCGACAUACCGAUU | SEQ ID | UCGGUAUGUCGACAUACAUUA | SEQ ID | AUGUAUGUCGACAUACCGA | 0.3913 | |
| | NO: | | NO: | | NO: 2705 | | | |
| | 821 | | 1763 | | | | | |
| MA0822 | SEQ ID | UGUAUGUCGACAUACCGAUUG | SEQ ID | AUCGGUAUGUCGACAUACAUU | SEQ ID | UGUAUGUCGACAUACCGAU | 0.4948 | |
| | NO: | | NO: | | NO: 2706 | | | |
| | 822 | | 1764 | | | | | |
| MA0823 | SEQ ID | AUGUCGACAUACCGAUUGUUG | SEQ ID | ACAAUCGGUAUGUCGACAUAC | SEQ ID | AUGUCGACAUACCGAUUGU | 0.5940 | * |
| | NO: | | NO: | | NO: 2707 | | | |
| | 823 | | 1765 | | | | | |
| MA0824 | SEQ ID | UGUCGACAUACCGAUUGUUGA | SEQ ID | AACAAUCGGUAUGUCGACAUA | SEQ ID | UGUCGACAUACCGAUUGUU | 0.5752 | * |
| | NO: | | NO: | | NO: 2708 | | | |
| | 824 | | 1766 | | | | | |
| MA0825 | SEQ ID | CCGAUUGUUGACCAUCAAAAA | SEQ ID | UUUGAUGGUCAACAAUCGGUA | SEQ ID | CCGAUUGUUGACCAUCAAA | 0.5365 | * |
| | NO: | | NO: | | NO: 2709 | | | |
| | 825 | | 1767 | | | | | |
| MA0826 | SEQ ID | CGAUUGUUGACCAUCAAAAAU | SEQ ID | UUUUGAUGGUCAACAAUCGGU | SEQ ID | CGAUUGUUGACCAUCAAAA | 0.2433 | |
| | NO: | | NO: | | NO: 2710 | | | |
| | 826 | | 1768 | | | | | |
| MA0827 | SEQ ID | GAUUGUUGACCAUCAAAAAUG | SEQ ID | UUUUUGAUGGUCAACAAUCGG | SEQ ID | GAUUGUUGACCAUCAAAAA | 0.3497 | |
| | NO: | | NO: | | NO: 2711 | | | |
| | 827 | | 1769 | | | | | |
| MA0828 | SEQ ID | UGUUGACCAUCAAAAAUGUAC | SEQ ID | ACAUUUUUGAUGGUCAACAAU | SEQ ID | UGUUGACCAUCAAAAAUGU | 0.5364 | * |
| | NO: | | NO: | | NO: 2712 | | | |
| | 828 | | 1770 | | | | | |
| MA0829 | SEQ ID | GUUGACCAUCAAAAAUGUACU | SEQ ID | UACAUUUUUGAUGGUCAACAA | SEQ ID | GUUGACCAUCAAAAAUGUA | 0.4364 | |
| | NO: | | NO: | | NO: 2713 | | | |
| | 829 | | 1771 | | | | | |
| MA0830 | SEQ ID | UUGACCAUCAAAAAUGUACUG | SEQ ID | GUACAUUUUUGAUGGUCAACA | SEQ ID | UUGACCAUCAAAAAUGUAC | 0.5726 | * |
| | NO: | | NO: | | NO: 2714 | | | |
| | 830 | | 1772 | | | | | |
| MA0831 | SEQ ID | AAAAUGUACUGCUGCAUAUGA | SEQ ID | AUAUGCAGCAGUACAUUUUUG | SEQ ID | AAAAUGUACUGCUGCAUAU | 0.5474 | * |
| | NO: | | NO: | | NO: 2715 | | | |
| | 831 | | 1773 | | | | | |
| MA0832 | SEQ ID | UGUACUGCUGCAUAUGAAAAG | SEQ ID | UUUCAUAUGCAGCAGUACAUU | SEQ ID | UGUACUGCUGCAUAUGAAA | 0.4535 | |
| | NO: | | NO: | | NO: 2716 | | | |
| | 832 | | 1774 | | | | | |
| MA0833 | SEQ ID | CUGCUGCAUAUGAAAAGCCAC | SEQ ID | GGCUUUUCAUAUGCAGCAGUA | SEQ ID | CUGCUGCAUAUGAAAAGCC | 0.2403 | |
| | NO: | | NO: | | NO: 2717 | | | |
| | 833 | | 1775 | | | | | |
| MA0834 | SEQ ID | UGCUGCAUAUGAAAAGCCACC | SEQ ID | UGGCUUUUCAUAUGCAGCAGU | SEQ ID | UGCUGCAUAUGAAAAGCCA | 0.4553 | * |
| | NO: | | NO: | | NO: 2718 | | | |
| | 834 | | 1776 | | | | | |
| MA0835 | SEQ ID | GCUGCAUAUGAAAAGCCACCC | SEQ ID | GUGGCUUUUCAUAUGCAGCAG | SEQ ID | GCUGCAUAUGAAAAGCCAC | 0.5889 | |
| | NO: | | NO: | | NO: 2719 | | | |
| | 835 | | 1777 | | | | | |
| MA0836 | SEQ ID | CAUAUGAAAAGCCACCCUAUC | SEQ ID | UAGGGUGGCUUUUCAUAUGCA | SEQ ID | CAUAUGAAAAGCCACCCUA | 0.4989 | * |
| | NO: | | NO: | | NO: 2720 | | | |
| | 836 | | 1778 | | | | | |

TABLE 1-20

| | | | | | | | rela- | |
|---|---|---|---|---|---|---|---|---|
| double | | | | | | | tive | |
| stranded | | | | | | | ex- | |
| nucleic | | | | antisense strand | | | pres- | |
| acid | SEQ ID | sense strand sequence | SEQ ID | sequence | SEQ ID | target MASP2 | sion | |
| number | NO: | (5′--->3′) | NO: | (5′--->3′) | NO: | mRNA sequence | level | note |
| MA0837 | SEQ ID | CCACCCUAUCCAAGGGGAAGU | SEQ ID | UUCCCCUUGGAUAGGGUGGCU | SEQ ID | CCACCCUAUCCAAGGGGAA | 0.5249 | |
| | NO: | | NO: | | NO: 2721 | | | |
| | 837 | | 1779 | | | | | |
| MA0838 | SEQ ID | UAUCCAAGGGGAAGUGUAACU | SEQ ID | UUACACUUCCCCUUGGAUAGG | SEQ ID | UAUCCAAGGGGAAGUGUAA | 0.4134 | |
| | NO: | | NO: | | NO: 2722 | | | |
| | 838 | | 1780 | | | | | |
| MA0839 | SEQ ID | UCCAAGGGGAAGUGUAACUGC | SEQ ID | AGUUACACUUCCCCUUGGAUA | SEQ ID | UCCAAGGGGAAGUGUAACU | 0.4837 | * |
| | NO: | | NO: | | NO: 2723 | | | |
| | 839 | | 1781 | | | | | |
| MA0840 | SEQ ID | AAGUGUAACUGCUAACAUGCU | SEQ ID | CAUGUUAGCAGUUACACUUCC | SEQ ID | AAGUGUAACUGCUAACAUG | 0.4081 | |
| | NO: | | NO: | | NO: 2724 | | | |
| | 840 | | 1782 | | | | | |
| MA0841 | SEQ ID | GUGUAACUGCUAACAUGCUUU | SEQ ID | AGCAUGUUAGCAGUUACACUU | SEQ ID | GUGUAACUGCUAACAUGCU | 0.4491 | * |
| | NO: | | NO: | | NO: 2725 | | | |
| | 841 | | 1783 | | | | | |
| MA0842 | SEQ ID | CUGCUAACAUGCUUUGUGCUG | SEQ ID | GCACAAAGCAUGUUAGCAGUU | SEQ ID | CUGCUAACAUGCUUUGUGC | 0.2141 | |
| | NO: | | NO: | | NO: 2726 | | | |
| | 842 | | 1784 | | | | | |
| MA0843 | SEQ ID | UGCUAACAUGCUUUGUGCUGG | SEQ ID | AGCACAAAGCAUGUUAGCAGU | SEQ ID | UGCUAACAUGCUUUGUGCU | 0.4940 | |
| | NO: | | NO: | | NO: 2727 | | | |
| | 843 | | 1785 | | | | | |
| MA0844 | SEQ ID | CAUGCUUUGUGCUGGCUUAGA | SEQ ID | UAAGCCAGCACAAAGCAUGUU | SEQ ID | CAUGCUUUGUGCUGGCUUA | 0.5449 | * |
| | NO: | | NO: | | NO: 2728 | | | |
| | 844 | | 1786 | | | | | |
| MA0845 | SEQ ID | UGCUUUGUGCUGGCUUAGAAA | SEQ ID | UCUAAGCCAGCACAAAGCAUG | SEQ ID | UGCUUUGUGCUGGCUUAGA | 0.4866 | |
| | NO: | | NO: | | NO: 2729 | | | |
| | 845 | | 1787 | | | | | |
| MA0846 | SEQ ID | GCUUUGUGCUGGCUUAGAAAG | SEQ ID | UUCUAAGCCAGCACAAAGCAU | SEQ ID | GCUUUGUGCUGGCUUAGAA | 0.5630 | * |
| | NO: | | NO: | | NO: 2730 | | | |
| | 846 | | 1788 | | | | | |
| MA0847 | SEQ ID | AGGACAGCUGCAGAGGUGACA | SEQ ID | UCACCUCUGCAGCUGUCCUUG | SEQ ID | AGGACAGCUGCAGAGGUGA | 0.5885 | * |
| | NO: | | NO: | | NO: 2731 | | | |
| | 847 | | 1789 | | | | | |
| MA0848 | SEQ ID | UGCAGAGGUGACAGCGGAGGG | SEQ ID | CUCCGCUGUCACCUCUGCAGC | SEQ ID | UGCAGAGGUGACAGCGGAG | 0.4029 | |
| | NO: | | NO: | | NO: 2732 | | | |
| | 848 | | 1790 | | | | | |
| MA0849 | SEQ ID | GGGCACUGGUGUUUCUAGAUA | SEQ ID | UCUAGAAACACCAGUGCCCCU | SEQ ID | GGGCACUGGUGUUUCUAGA | 0.4905 | |
| | NO: | | NO: | | NO: 2733 | | | |
| | 849 | | 1791 | | | | | |
| MA0850 | SEQ ID | GCACUGGUGUUUCUAGAUAGU | SEQ ID | UAUCUAGAAACACCAGUGCCC | SEQ ID | GCACUGGUGUUUCUAGAUA | 0.5575 | * |
| | NO: | | NO: | | NO: 2734 | | | |
| | 850 | | 1792 | | | | | |
| MA0851 | SEQ ID | UGGUGUUUCUAGAUAGUGAAA | SEQ ID | UCACUAUCUAGAAACACCAGU | SEQ ID | UGGUGUUUCUAGAUAGUGA | 0.4764 | |
| | NO: | | NO: | | NO: 2735 | | | |
| | 851 | | 1793 | | | | | |
| MA0852 | SEQ ID | GUUUCUAGAUAGUGAAACAGA | SEQ ID | UGUUUCACUAUCUAGAAACAC | SEQ ID | GUUUCUAGAUAGUGAAACA | 0.5278 | * |
| | NO: | | NO: | | NO: 2736 | | | |
| | 852 | | 1794 | | | | | |
| MA0853 | SEQ ID | GUGAAACAGAGAGGUGGUUUG | SEQ ID | AACCACCUCUCUGUUUCACUA | SEQ ID | GUGAAACAGAGAGGUGGUU | 0.4690 | |
| | NO: | | NO: | | NO: 2737 | | | |
| | 853 | | 1795 | | | | | |
| MA0854 | SEQ ID | GAAACAGAGAGGUGGUUUGUG | SEQ ID | CAAACCACCUCUCUGUUUCAC | SEQ ID | GAAACAGAGAGGUGGUUUG | 0.5064 | |
| | NO: | | NO: | | NO: 2738 | | | |
| | 854 | | 1796 | | | | | |
| MA0855 | SEQ ID | GAGAGGUGGUUUGUGGGAGGA | SEQ ID | CUCCCACAAACCACCUCUCUG | SEQ ID | GAGAGGUGGUUUGUGGGAG | 0.4722 | |
| | NO: | | NO: | | NO: 2739 | | | |
| | 855 | | 1797 | | | | | |
| MA0856 | SEQ ID | GGUGGUUUGUGGGAGGAAUAG | SEQ ID | AUUCCUCCCACAAACCACCUC | SEQ ID | GGUGGUUUGUGGGAGGAAU | 0.5179 | * |
| | NO: | | NO: | | NO: 2740 | | | |
| | 856 | | 1798 | | | | | |
| MA0857 | SEQ ID | GAGGAAUAGUGUCCUGGGGUU | SEQ ID | CCCCAGGACACUAUUCCUCCC | SEQ ID | GAGGAAUAGUGUCCUGGGG | 0.5684 | * |
| | NO: | | NO: | | NO: 2741 | | | |
| | 857 | | 1799 | | | | | |
| MA0858 | SEQ ID | AGGAAUAGUGUCCUGGGGUUC | SEQ ID | ACCCCAGGACACUAUUCCUCC | SEQ ID | AGGAAUAGUGUCCUGGGGU | 0.5121 | * |
| | NO: | | NO: | | NO: 2742 | | | |
| | 858 | | 1800 | | | | | |
| MA0859 | SEQ ID | UAGUGUCCUGGGGUUCCAUGA | SEQ ID | AUGGAACCCCAGGACACUAUU | SEQ ID | UAGUGUCCUGGGGUUCCAU | 0.5732 | * |
| | NO: | | NO: | | NO: 2743 | | | |
| | 859 | | 1801 | | | | | |
| MA0860 | SEQ ID | GGGUUCCAUGAAUUGUGGGGA | SEQ ID | CCCACAAUUCAUGGAACCCCA | SEQ ID | GGGUUCCAUGAAUUGUGGG | 0.5680 | * |
| | NO: | | NO: | | NO: 2744 | | | |
| | 860 | | 1802 | | | | | |
| MA0861 | SEQ ID | CAUGAAUUGUGGGGAAGCAGG | SEQ ID | UGCUUCCCCACAAUUCAUGGA | SEQ ID | CAUGAAUUGUGGGGAAGCA | 0.4750 | * |
| | NO: | | NO: | | NO: 2745 | | | |
| | 861 | | 1803 | | | | | |
| MA0862 | SEQ ID | UGUGGGGAAGCAGGUCAGUAU | SEQ ID | ACUGACCUGCUUCCCCACAAU | SEQ ID | UGUGGGGAAGCAGGUCAGU | 0.5107 | |
| | NO: | | NO: | | NO: 2746 | | | |
| | 862 | | 1804 | | | | | |
| MA0863 | SEQ ID | GCAGGUCAGUAUGGAGUCUAC | SEQ ID | AGACUCCAUACUGACCUGCUU | SEQ ID | GCAGGUCAGUAUGGAGUCU | 0.5578 | * |
| | NO: | | NO: | | NO: 2747 | | | |
| | 863 | | 1805 | | | | | |
| MA0864 | SEQ ID | CAGGUCAGUAUGGAGUCUACA | SEQ ID | UAGACUCCAUACUGACCUGCU | SEQ ID | CAGGUCAGUAUGGAGUCUA | 0.5509 | * |
| | NO: | | NO: | | NO: 2748 | | | |
| | 864 | | 1806 | | | | | |
| MA0865 | SEQ ID | AGGUCAGUAUGGAGUCUACAC | SEQ ID | GUAGACUCCAUACUGACCUGC | SEQ ID | AGGUCAGUAUGGAGUCUAC | 0.1647 | |
| | NO: | | NO: | | NO: 2749 | | | |
| | 865 | | 1807 | | | | | |
| MA0866 | SEQ ID | GGUCAGUAUGGAGUCUACACA | SEQ ID | UGUAGACUCCAUACUGACCUG | SEQ ID | GGUCAGUAUGGAGUCUACA | 0.3371 | |
| | NO: | | NO: | | NO: 2750 | | | |
| | 866 | | 1808 | | | | | |
| MA0867 | SEQ ID | UCAGUAUGGAGUCUACACAAA | SEQ ID | UGUGUAGACUCCAUACUGACC | SEQ ID | UCAGUAUGGAGUCUACACA | 0.4485 | |
| | NO: | | NO: | | NO: 2751 | | | |
| | 867 | | 1809 | | | | | |
| MA0868 | SEQ ID | CAGUAUGGAGUCUACACAAAA | SEQ ID | UUGUGUAGACUCCAUACUGAC | SEQ ID | CAGUAUGGAGUCUACACAA | 0.2882 | |
| | NO: | | NO: | | 2752 | | | |
| | 868 | | 1810 | | | | | |
| MA0869 | SEQ ID | AGUAUGGAGUCUACACAAAAG | SEQ ID | UUUGUGUAGACUCCAUACUGA | SEQ ID | AGUAUGGAGUCUACACAAA | 0.5147 | * |
| | NO: | | NO: | | 2753 | | | |
| | 869 | | 1811 | | | | | |
| MA0870 | SEQ ID | UAUGGAGUCUACACAAAAGUU | SEQ ID | CUUUUGUGUAGACUCCAUACU | SEQ ID | UAUGGAGUCUACACAAAAG | 0.4701 | * |
| | NO: | | NO: | | 2754 | | | |
| | 870 | | 1812 | | | | | |
| MA0871 | SEQ ID | GGAGUCUACACAAAAGUUAUU | SEQ ID | UAACUUUUGUGUAGACUCCAU | SEQ ID | GGAGUCUACACAAAAGUUA | 0.4153 | |
| | NO: | | NO: | | NO: 2755 | | | |
| | 871 | | 1813 | | | | | |
| MA0872 | SEQ ID | GAGUCUACACAAAAGUUAUUA | SEQ ID | AUAACUUUUGUGUAGACUCCA | SEQ ID | GAGUCUACACAAAAGUUAU | 0.2917 | |
| | NO: | | NO: | | NO: 2756 | | | |
| | 872 | | 1814 | | | | | |
| MA0873 | SEQ ID | CUACACAAAAGUUAUUAACUA | SEQ ID | GUUAAUAACUUUUGUGUAGAC | SEQ ID | CUACACAAAAGUUAUUAAC | 0.4407 | |
| | NO: | | NO: | | NO: 2757 | | | |
| | 873 | | 1815 | | | | | |
| MA0874 | SEQ ID | UUAUUAACUAUAUUCCCUGGA | SEQ ID | CAGGGAAUAUAGUUAAUAACU | SEQ ID | UUAUUAACUAUAUUCCCUG | 0.5889 | * |
| | NO: | | NO: | | NO: 2758 | | | |
| | 874 | | 1816 | | | | | |
| MA0875 | SEQ ID | CUAUAUUCCCUGGAUCGAGAA | SEQ ID | CUCGAUCCAGGGAAUAUAGUU | SEQ ID | CUAUAUUCCCUGGAUCGAG | 0.5580 | * |
| | NO: | | NO: | | NO: 2759 | | | |
| | 875 | | 1817 | | | | | |
| MA0876 | SEQ ID | AUAUUCCCUGGAUCGAGAACA | SEQ ID | UUCUCGAUCCAGGGAAUAUAG | SEQ ID | AUAUUCCCUGGAUCGAGAA | 0.5589 | * |
| | NO: | | NO: | | NO: 2760 | | | |
| | 876 | | 1818 | | | | | |
| MA0877 | SEQ ID | CCCUGGAUCGAGAACAUAAUU | SEQ ID | UUAUGUUCUCGAUCCAGGGAA | SEQ ID | CCCUGGAUCGAGAACAUAA | 0.3726 | |
| | NO: | | NO: | | NO: 2761 | | | |
| | 877 | | 1819 | | | | | |
| MA0878 | SEQ ID | CUGGAUCGAGAACAUAAUUAG | SEQ ID | AAUUAUGUUCUCGAUCCAGGG | SEQ ID | CUGGAUCGAGAACAUAAUU | 0.5584 | * |
| | NO: | | NO: | | NO: 2762 | | | |
| | 878 | | 1820 | | | | | |
| MA0879 | SEQ ID | GAUCGAGAACAUAAUUAGUGA | SEQ ID | ACUAAUUAUGUUCUCGAUCCA | SEQ ID | GAUCGAGAACAUAAUUAGU | 0.5592 | * |
| | NO: | | NO: | | NO: 2763 | | | |
| | 879 | | 1821 | | | | | |
| MA0880 | SEQ ID | UCGAGAACAUAAUUAGUGAUU | SEQ ID | UCACUAAUUAUGUUCUCGAUC | SEQ ID | UCGAGAACAUAAUUAGUGA | 0.5565 | * |
| | NO: | | NO: | | NO: 2764 | | | |
| | 880 | | 1822 | | | | | |

TABLE 1-21

| | | | | | | | rela- | |
|---|---|---|---|---|---|---|---|---|
| double | | | | | | | tive | |
| stranded | | | | | | | ex- | |
| nucleic | | | | antisense strand | | | pres- | |
| acid | SEQ ID | sense strand sequence | SEQ ID | sequence | SEQ ID | target MASP2 | sion | |
| number | NO: | (5′--->3′) | NO: | (5′--->3′) | NO: | mRNA sequence | level | note |
| MA0881 | SEQ ID | CGAGAACAUAAUUAGUGAUUU | SEQ ID | AUCACUAAUUAUGUUCUCGAU | SEQ ID | CGAGAACAUAAUUAGUGAU | 0.4365 | |
| | NO: | | NO: | | NO: 2765 | | | |
| | 881 | | 1823 | | | | | |
| MA0882 | SEQ ID | ACAUAAUUAGUGAUUUUUAAC | SEQ ID | UAAAAAUCACUAAUUAUGUUC | SEQ ID | ACAUAAUUAGUGAUUUUUA | 0.5751 | * |
| | NO: | | NO: | | NO: 2766 | | | |
| | 882 | | 1824 | | | | | |
| MA0883 | SEQ ID | CAUAAUUAGUGAUUUUUAACU | SEQ ID | UUAAAAAUCACUAAUUAUGUU | SEQ ID | CAUAAUUAGUGAUUUUUAA | 0.5234 | * |
| | NO: | | NO: | | NO: 2767 | | | |
| | 883 | | 1825 | | | | | |
| MA0884 | SEQ ID | AUAAUUAGUGAUUUUUAACUU | SEQ ID | GUUAAAAAUCACUAAUUAUGU | SEQ ID | AUAAUUAGUGAUUUUUAAC | 0.5516 | * |
| | NO: | | NO: | | NO: 2768 | | | |
| | 884 | | 1826 | | | | | |
| MA0885 | SEQ ID | CUUGCGUGUCUGCAGUCAAGG | SEQ ID | UUGACUGCAGACACGCAAGUU | SEQ ID | CUUGCGUGUCUGCAGUCAA | 0.5509 | * |
| | NO: | | NO: | | NO: 2769 | | | |
| | 885 | | 1827 | | | | | |
| MA0886 | SEQ ID | GCGUGUCUGCAGUCAAGGAUU | SEQ ID | UCCUUGACUGCAGACACGCAA | SEQ ID | GCGUGUCUGCAGUCAAGGA | 0.4770 | * |
| | NO: | | NO: | | NO: 2770 | | | |
| | 886 | | 1828 | | | | | |
| MA0887 | SEQ ID | CUGCAGUCAAGGAUUCUUCAU | SEQ ID | GAAGAAUCCUUGACUGCAGAC | SEQ ID | CUGCAGUCAAGGAUUCUUC | 0.5236 | * |
| | NO: | | NO: | | NO: 2771 | | | |
| | 887 | | 1829 | | | | | |
| MA0888 | SEQ ID | GCAGUCAAGGAUUCUUCAUUU | SEQ ID | AUGAAGAAUCCUUGACUGCAG | SEQ ID | GCAGUCAAGGAUUCUUCAU | 0.4528 | |
| | NO: | | NO: | | NO: 2772 | | | |
| | 888 | | 1830 | | | | | |
| MA0889 | SEQ ID | GUCAAGGAUUCUUCAUUUUUA | SEQ ID | AAAAUGAAGAAUCCUUGACUG | SEQ ID | GUCAAGGAUUCUUCAUUUU | 0.3764 | |
| | NO: | | NO: | | NO: 2773 | | | |
| | 889 | | 1831 | | | | | |
| MA0890 | SEQ ID | CAAGGAUUCUUCAUUUUUAGA | SEQ ID | UAAAAAUGAAGAAUCCUUGAC | SEQ ID | CAAGGAUUCUUCAUUUUUA | 0.5676 | * |
| | NO: | | NO: | | NO: 2774 | | | |
| | 890 | | 1832 | | | | | |
| MA0891 | SEQ ID | AUUCUUCAUUUUUAGAAAUGC | SEQ ID | AUUUCUAAAAAUGAAGAAUCC | SEQ ID | AUUCUUCAUUUUUAGAAAU | 0.3217 | |
| | NO: | | NO: | | NO: 2775 | | | |
| | 891 | | 1833 | | | | | |
| MA0892 | SEQ ID | GACCUUGGCAGCGACGUGGCU | SEQ ID | CCACGUCGCUGCCAAGGUCUU | SEQ ID | GACCUUGGCAGCGACGUGG | 0.5836 | |
| | NO: | | NO: | | NO: 2776 | | | |
| | 892 | | 1834 | | | | | |
| MA0893 | SEQ ID | AGCGACGUGGCUCGAGAAGCA | SEQ ID | CUUCUCGAGCCACGUCGCUGC | SEQ ID | AGCGACGUGGCUCGAGAAG | 0.4633 | |
| | NO: | | NO: | | NO: 2777 | | | |
| | 893 | | 1835 | | | | | |
| MA0894 | SEQ ID | GCUCGAGAAGCAUUCAUCAUU | SEQ ID | UGAUGAAUGCUUCUCGAGCCA | SEQ ID | GCUCGAGAAGCAUUCAUCA | 0.4291 | * |
| | NO: | | NO: | | NO: 2778 | | | |
| | 894 | | 1836 | | | | | |
| MA0895 | SEQ ID | GCAUUCAUCAUUACUGUGGAC | SEQ ID | CCACAGUAAUGAUGAAUGCUU | SEQ ID | GCAUUCAUCAUUACUGUGG | 0.5987 | * |
| | NO: | | NO: | | NO: 2779 | | | |
| | 895 | | 1837 | | | | | |
| MA0896 | SEQ ID | CAUUCAUCAUUACUGUGGACA | SEQ ID | UCCACAGUAAUGAUGAAUGCU | SEQ ID | CAUUCAUCAUUACUGUGGA | 0.5723 | * |
| | NO: | | NO: | | NO: 2780 | | | |
| | 896 | | 1838 | | | | | |
| MA0897 | SEQ ID | CAUCAUUACUGUGGACAUGGC | SEQ ID | CAUGUCCACAGUAAUGAUGAA | SEQ ID | CAUCAUUACUGUGGACAUG | 0.3083 | |
| | NO: | | NO: | | NO: 2781 | | | |
| | 897 | | 1839 | | | | | |
| MA0898 | SEQ ID | AUCAUUACUGUGGACAUGGCA | SEQ ID | CCAUGUCCACAGUAAUGAUGA | SEQ ID | AUCAUUACUGUGGACAUGG | 0.5209 | * |
| | NO: | | NO: | | NO: 2782 | | | |
| | 898 | | 1840 | | | | | |
| MA0899 | SEQ ID | CAUUACUGUGGACAUGGCAGU | SEQ ID | UGCCAUGUCCACAGUAAUGAU | SEQ ID | CAUUACUGUGGACAUGGCA | 0.5665 | |
| | NO: | | NO: | | NO: 2783 | | | |
| | 899 | | 1841 | | | | | |
| MA0900 | SEQ ID | AGUUGUUGCUCCACCCAAAAA | SEQ ID | UUUGGGUGGAGCAACAACUGC | SEQ ID | AGUUGUUGCUCCACCCAAA | 0.5279 | |
| | NO: | | NO: | | NO: 2784 | | | |
| | 900 | | 1842 | | | | | |
| MA0901 | SEQ ID | UCCAGGUGAGGCUGCUGUCAU | SEQ ID | GACAGCAGCCUCACCUGGAGU | SEQ ID | UCCAGGUGAGGCUGCUGUC | 0.5279 | * |
| | NO: | | NO: | | NO: 2785 | | | |
| | 901 | | 1843 | | | | | |
| MA0902 | SEQ ID | GUGAGGCUGCUGUCAUUUCUC | SEQ ID | GAAAUGACAGCAGCCUCACCU | SEQ ID | GUGAGGCUGCUGUCAUUUC | 0.5074 | * |
| | NO: | | NO: | | NO: 2786 | | | |
| | 902 | | 1844 | | | | | |
| MA0903 | SEQ ID | CUGCUGUCAUUUCUCCACUUG | SEQ ID | AGUGGAGAAAUGACAGCAGCC | SEQ ID | CUGCUGUCAUUUCUCCACU | 0.4151 | |
| | NO: | | NO: | | NO: 2787 | | | |
| | 903 | | 1845 | | | | | |
| MA0904 | SEQ ID | CUGUCAUUUCUCCACUUGCCA | SEQ ID | GCAAGUGGAGAAAUGACAGCA | SEQ ID | CUGUCAUUUCUCCACUUGC | 0.3187 | |
| | NO: | | NO: | | NO: 2788 | | | |
| | 904 | | 1846 | | | | | |
| MA0905 | SEQ ID | CAUUUCUCCACUUGCCAGUUU | SEQ ID | ACUGGCAAGUGGAGAAAUGAC | SEQ ID | CAUUUCUCCACUUGCCAGU | 0.4096 | |
| | NO: | | NO: | | NO: 2789 | | | |
| | 905 | | 1847 | | | | | |
| MA0906 | SEQ ID | UCUCCACUUGCCAGUUUAAUU | SEQ ID | UUAAACUGGCAAGUGGAGAAA | SEQ ID | UCUCCACUUGCCAGUUUAA | 0.2167 | |
| | NO: | | NO: | | NO: 2790 | | | |
| | 906 | | 1848 | | | | | |
| MA0907 | SEQ ID | CUCCACUUGCCAGUUUAAUUC | SEQ ID | AUUAAACUGGCAAGUGGAGAA | SEQ ID | CUCCACUUGCCAGUUUAAU | 0.4924 | |
| | NO: | | NO: | | NO: 2791 | | | |
| | 907 | | 1849 | | | | | |
| MA0908 | SEQ ID | GUUUAAUUCCAGCCUUACCCA | SEQ ID | GGUAAGGCUGGAAUUAAACUG | SEQ ID | GUUUAAUUCCAGCCUUACC | 0.5411 | |
| | NO: | | NO: | | NO: 2792 | | | |
| | 908 | | 1850 | | | | | |
| MA0909 | SEQ ID | UUCCAGCCUUACCCAUUGACU | SEQ ID | UCAAUGGGUAAGGCUGGAAUU | SEQ ID | UUCCAGCCUUACCCAUUGA | 0.5060 | * |
| | NO: | | NO: | | NO: 2793 | | | |
| | 909 | | 1851 | | | | | |
| MA0910 | SEQ ID | CAUUGACUCAAGGGGACAUAA | SEQ ID | AUGUCCCCUUGAGUCAAUGGG | SEQ ID | CAUUGACUCAAGGGGACAU | 0.5487 | * |
| | NO: | | NO: | | NO: 2794 | | | |
| | 910 | | 1852 | | | | | |
| MA0911 | SEQ ID | AUUGACUCAAGGGGACAUAAA | SEQ ID | UAUGUCCCCUUGAGUCAAUGG | SEQ ID | AUUGACUCAAGGGGACAUA | 0.3894 | |
| | NO: | | NO: | | NO: 2795 | | | |
| | 911 | | 1853 | | | | | |
| MA0912 | SEQ ID | AAGGGGACAUAAACCACGAGA | SEQ ID | UCGUGGUUUAUGUCCCCUUGA | SEQ ID | AAGGGGACAUAAACCACGA | 0.5170 | |
| | NO: | | NO: | | NO: 2796 | | | |
| | 912 | | 1854 | | | | | |
| MA0913 | SEQ ID | GGGGACAUAAACCACGAGAGU | SEQ ID | UCUCGUGGUUUAUGUCCCCUU | SEQ ID | GGGGACAUAAACCACGAGA | 0.5839 | * |
| | NO: | | NO: | | NO: 2797 | | | |
| | 913 | | 1855 | | | | | |
| MA0914 | SEQ ID | GGACAUAAACCACGAGAGUGA | SEQ ID | ACUCUCGUGGUUUAUGUCCCC | SEQ ID | GGACAUAAACCACGAGAGU | 0.4247 | |
| | NO: | | NO: | | NO: 2798 | | | |
| | 914 | | 1856 | | | | | |
| MA0915 | SEQ ID | GACAUAAACCACGAGAGUGAC | SEQ ID | CACUCUCGUGGUUUAUGUCCC | SEQ ID | GACAUAAACCACGAGAGUG | 0.5401 | * |
| | NO: | | NO: | | NO: 2799 | | | |
| | 915 | | 1857 | | | | | |
| MA0916 | SEQ ID | CAUAAACCACGAGAGUGACAG | SEQ ID | GUCACUCUCGUGGUUUAUGUC | SEQ ID | CAUAAACCACGAGAGUGAC | 0.5976 | * |
| | NO: | | NO: | | NO: 2800 | | | |
| | 916 | | 1858 | | | | | |
| MA0917 | SEQ ID | AUAAACCACGAGAGUGACAGU | SEQ ID | UGUCACUCUCGUGGUUUAUGU | SEQ ID | AUAAACCACGAGAGUGACA | 0.5629 | |
| | NO: | | NO: | | NO: 2801 | | | |
| | 917 | | 1859 | | | | | |
| MA0918 | SEQ ID | CCACGAGAGUGACAGUCAUCU | SEQ ID | AUGACUGUCACUCUCGUGGUU | SEQ ID | CCACGAGAGUGACAGUCAU | 0.5923 | * |
| | NO: | | NO: | | NO: 2802 | | | |
| | 918 | | 1860 | | | | | |
| MA0919 | SEQ ID | CGAGAGUGACAGUCAUCUUUG | SEQ ID | AAGAUGACUGUCACUCUCGUG | SEQ ID | CGAGAGUGACAGUCAUCUU | 0.5774 | * |
| | NO: | | NO: | | NO: 2803 | | | |
| | 919 | | 1861 | | | | | |
| MA0920 | SEQ ID | AUCUUUGCCCACCCAGUGUAA | SEQ ID | ACACUGGGUGGGCAAAGAUGA | SEQ ID | AUCUUUGCCCACCCAGUGU | 0.5828 | * |
| | NO: | | NO: | | NO: 2804 | | | |
| | 920 | | 1862 | | | | | |
| MA0921 | SEQ ID | CUUUGCCCACCCAGUGUAAUG | SEQ ID | UUACACUGGGUGGGCAAAGAU | SEQ ID | CUUUGCCCACCCAGUGUAA | 0.4104 | |
| | NO: | | NO: | | NO: 2805 | | | |
| | 921 | | 1863 | | | | | |
| MA0922 | SEQ ID | UGCCCACCCAGUGUAAUGUCA | SEQ ID | ACAUUACACUGGUGGGCAAA | SEQ ID | UGCCCACCCAGUGUAAUGU | 0.5373 | |
| | NO: | | NO: | | NO: 2806 | | | |
| | 922 | | 1864 | | | | | |
| MA0923 | SEQ ID | GCCCACCCAGUGUAAUGUCAC | SEQ ID | GACAUUACACUGGGUGGGCAA | SEQ ID | GCCCACCCAGUGUAAUGUC | 0.4744 | |
| | NO: | | NO: | | NO: 2807 | | | |
| | 923 | | 1865 | | | | | |
| MA0924 | SEQ ID | CCACCCAGUGUAAUGUCACUG | SEQ ID | GUGACAUUACACUGGGUGGGC | SEQ ID | CCACCCAGUGUAAUGUCAC | 0.4833 | |
| | NO: | | NO: | | NO: 2808 | | | |
| | 924 | | 1866 | | | | | |

TABLE 1-22

| | | | | | | | rela- | |
|---|---|---|---|---|---|---|---|---|
| double | | | | | | | tive | |
| stranded | | | | | | | ex- | |
| nucleic | | | | antisense strand | | | pres- | |
| acid | SEQ ID | sense strand sequence | SEQ ID | sequence | SEQ ID | target MASP2 | sion | |
| number | NO: | (5′--->3′) | NO: | (5′--->3′) | NO: | mRNA sequence | level | note |
| MA0925 | SEQ ID | ACCCAGUGUAAUGUCACUGCU | SEQ ID | CAGUGACAUUACACUGGGUGG | SEQ ID | ACCCAGUGUAAUGUCACUG | 0.4053 | |
| | NO: | | NO: | | NO: 2809 | | | |
| | 925 | | 1867 | | | | | |
| MA0926 | SEQ ID | CCCAGUGUAAUGUCACUGCUC | SEQ ID | GCAGUGACAUUACACUGGGUG | SEQ ID | CCCAGUGUAAUGUCACUGC | 0.4145 | |
| | NO: | | NO: | | NO: 2810 | | | |
| | 926 | | 1868 | | | | | |
| MA0927 | SEQ ID | CCAGUGUAAUGUCACUGCUCA | SEQ ID | AGCAGUGACAUUACACUGGGU | SEQ ID | CCAGUGUAAUGUCACUGCU | 0.5300 | * |
| | NO: | | NO: | | NO: 2811 | | | |
| | 927 | | 1869 | | | | | |
| MA0928 | SEQ ID | GCUCAAAUUACAUUUCAUUAC | SEQ ID | AAUGAAAUGUAAUUUGAGCAG | SEQ ID | GCUCAAAUUACAUUUCAUU | 0.3970 | |
| | NO: | | NO: | | NO: 2812 | | | |
| | 928 | | 1870 | | | | | |
| MA0929 | SEQ ID | AAUUACAUUUCAUUACCUUAA | SEQ ID | AAGGUAAUGAAAUGUAAUUUG | SEQ ID | AAUUACAUUUCAUUACCUU | 0.5199 | |
| | NO: | | NO: | | NO: 2813 | | | |
| | 929 | | 1871 | | | | | |
| MA0930 | SEQ ID | AUUACAUUUCAUUACCUUAAA | SEQ ID | UAAGGUAAUGAAAUGUAAUUU | SEQ ID | AUUACAUUUCAUUACCUUA | 0.4176 | |
| | NO: | | NO: | | NO: 2814 | | | |
| | 930 | | 1872 | | | | | |
| MA0931 | SEQ ID | ACAUUUCAUUACCUUAAAAAG | SEQ ID | UUUUAAGGUAAUGAAAUGUAA | SEQ ID | ACAUUUCAUUACCUUAAAA | 0.3769 | |
| | NO: | | NO: | | NO: 2815 | | | |
| | 931 | | 1873 | | | | | |
| MA0932 | SEQ ID | CAUUUCAUUACCUUAAAAAGC | SEQ ID | UUUUUAAGGUAAUGAAAUGUA | SEQ ID | CAUUUCAUUACCUUAAAAA | 0.5313 | * |
| | NO: | | NO: | | NO: 2816 | | | |
| | 932 | | 1874 | | | | | |
| MA0933 | SEQ ID | UCAUUACCUUAAAAAGCCAGU | SEQ ID | UGGCUUUUUAAGGUAAUGAAA | SEQ ID | UCAUUACCUUAAAAAGCCA | 0.4984 | * |
| | NO: | | NO: | | NO: 2817 | | | |
| | 933 | | 1875 | | | | | |
| MA0934 | SEQ ID | GCUGUUGGCAUUUCUGUAAAC | SEQ ID | UUACAGAAAUGCCAACAGCCA | SEQ ID | GCUGUUGGCAUUUCUGUAA | 0.4096 | |
| | NO: | | NO: | | NO: 2818 | | | |
| | 934 | | 1876 | | | | | |
| MA0935 | SEQ ID | CUGUUGGCAUUUCUGUAAACU | SEQ ID | UUUACAGAAAUGCCAACAGCC | SEQ ID | CUGUUGGCAUUUCUGUAAA | 0.5750 | * |
| | NO: | | NO: | | NO: 2819 | | | |
| | 935 | | 1877 | | | | | |
| MA0936 | SEQ ID | GUUGGCAUUUCUGUAAACUGC | SEQ ID | AGUUUACAGAAAUGCCAACAG | SEQ ID | GUUGGCAUUUCUGUAAACU | 0.2238 | |
| | NO: | | NO: | | NO: 2820 | | | |
| | 936 | | 1878 | | | | | |
| MA0937 | SEQ ID | UGUAAACUGCCUGUCCAUGCU | SEQ ID | CAUGGACAGGCAGUUUACAGA | SEQ ID | UGUAAACUGCCUGUCCAUG | 0.5911 | * |
| | NO: | | NO: | | NO: 2821 | | | |
| | 937 | | 1879 | | | | | |
| MA0938 | SEQ ID | GUAAACUGCCUGUCCAUGCUC | SEQ ID | GCAUGGACAGGCAGUUUACAG | SEQ ID | GUAAACUGCCUGUCCAUGC | 0.3848 | |
| | NO: | | NO: | | NO: 2822 | | | |
| | 938 | | 1880 | | | | | |
| MA0939 | SEQ ID | UAAACUGCCUGUCCAUGCUCU | SEQ ID | AGCAUGGACAGGCAGUUUACA | SEQ ID | UAAACUGCCUGUCCAUGCU | 0.5680 | * |
| | NO: | | NO: | | NO: 2823 | | | |
| | 939 | | 1881 | | | | | |
| MA0940 | SEQ ID | UGUCCAUGCUCUUUGUUUUUA | SEQ ID | AAAACAAAGAGCAUGGACAGG | SEQ ID | UGUCCAUGCUCUUUGUUUU | 0.4754 | * |
| | NO: | | NO: | | NO: 2824 | | | |
| | 940 | | 1882 | | | | | |
| MA0941 | SEQ ID | CAUGCUCUUUGUUUUUAAACU | SEQ ID | UUUAAAAACAAAGAGCAUGGA | SEQ ID | CAUGCUCUUUGUUUUUAAA | 0.5897 | * |
| | NO: | | NO: | | NO: 2825 | | | |
| | 941 | | 1883 | | | | | |
| MA0942 | SEQ ID | UCUUUGUUUUUAAACUUGUUC | SEQ ID | ACAAGUUUAAAAACAAAGAGC | SEQ ID | UCUUUGUUUUUAAACUUGU | 0.5967 | * |
| | NO: | | NO: | | NO: 2826 | | | |
| | 942 | | 1884 | | | | | |

### Example 2

[0079] Measurement of Knockdown Activity of MASP2 mRNA in Human Cell with Modified siRNA

[0080] HepG2/C3A cells (obtained from ATCC, ATCC number: CRL-10741), which is a cell line derived from human liver cancer, were seeded to a 96-well culture plate at 10,000 cells/80 μL/well. As the medium, MEM medium (manufactured by Nacalai Tesque, catalog No.: 21442-25) containing 10% fetal bovine serum (FBS), 1 mM sodium pyruvate (manufactured by Nacalai Tesque, catalog No.: 06977-34), 1% MEM Non-Essential Amino Acids (manufactured by Thermo Fisher Scientific, catalog No.: 11140-050) was used. As the double stranded nucleic acids, those described in Table 2 and synthesized by GeneDesign, Inc. were used. Specifically, they are constituted of double-stranded nucleic acids obtained by annealing sense strands consisting of the ribonucleotide shown in SEQ ID NO: 2828-2899 and antisense strands consisting of the ribonucleotide shown in SEQ ID NO: 2900-2971 (sense strand shown in SEQ ID NO: n (n=2828-2899) and antisense strand shown in SEQ ID NO: [n+72] form a pair). A double-stranded nucleic acid described in Table 2 and an RNAiMax transfection reagent (manufactured by Thermo Fisher Scientific, catalog No.: 13778-150) were diluted with Opti-MEM medium (manufactured by Thermo Fisher Scientific, catalog No. 31985-070), and 20 μl of each siRNA/RNAiMax mixture was added to 96-well culture plate to the final concentration of double-stranded nucleic acid of 10 nM, and the mixture was cultured under the conditions 37° C., 5% CO₂ for 24 hrs. Thereafter, the cells were washed with PBS (phosphate buffered saline), and cDNA was synthesized from each plate by using SuperPrep (registered trade mark) Cell Lysis & RT Kit for qPCR kit (manufactured by Toyobo, catalog No.: SCQ-101) and according to the method described in the manual attached to the product. The cDNA (4 μL) was added to MicroAmp Optical 384-well plate (manufactured by Applied Biosystems, catalog No. 4309849), and 10 μL of TaqMan (registered trade mark) Gene Expression Master Mix (manufactured by Applied Biosystems, catalog No. 4369016), 4 μL of UltraPure Distilled Water (manufactured by Thermo Fisher Scientific, catalog No.: 10977-015), 1 μL of human MASP2 probe (manufactured by Applied Biosystems, Hs00198244 ml), and 1 μL of human GAPDH probe (manufactured by Applied Biosystems, Hs02786624_g1) were further added. The real-time PCR of human MASP2 gene and human GAPDH (D-glyceraldehyde-3-phosphate dehydrogenase) gene was performed by using the QuantStudio (registered trade mark) 12K Flex real-time PCR system. GAPDH is a constitutively expressed gene and was measured as the internal control, and the MASP2 expression level was normalized. The MASP2 mRNA relative expression level when each double stranded nucleic acid was introduced was calculated relative to the MASP2 mRNA amount when HepG2/C3A cells were treated with a transfection reagent alone without addition of siRNA as 1.0. This experiment was performed 2 or 4 times and the mean of the MASP2 mRNA relative expression level is shown in Table 2. In the column of note in Table 2, * shows mean of four experiments and other shows mean of two experiments.

TABLE 2

| double | | | |
|---|---|---|---|
| stranded | | | |
| nucleic | | | |
| acid | SEQ ID | sense strand sequence | SEQ ID |
| number | NO: | (5′--->3′) | NO: |
| MB0001 | SEQ ID | U(F)G(M)G(F)G(M)C(F)C(M)C(F)G(M)A(F)A(M)G | SEQ ID |
| | NO: | (F)U(F)G(M)G(F)C(M)C(F)U(M)G(F)A(M)A(F)C | NO: |
| | 2828 | (M) | 2900 |
| MB0002 | SEQ ID | C(F)C(M)C(F)G(M)A(F)A(M)G(F)U(M)G(F)G(M)C | SEQ ID |
| | NO: | (F)C(F)U(M)G(F)A(M)A(F)C(M)C(F)U(M)G(F)U | NO: |
| | 2829 | (M) | 2901 |
| MB0003 | SEQ ID | A(F)G(M)G(F)A(M)G(F)C(M)G(F)G(M)C(F)G(M)C | SEQ ID |
| | NO: | (F)U(F)G(M)G(F)A(M)C(F)C(M)C(F)U(M)G(F)A | NO: |
| | 2830 | (M) | 2902 |
| MB0004 | SEQ ID | A(F)C(M)C(F)G(M)C(F)C(M)U(F)G(M)C(F)G(M)C | SEQ ID |
| | NO: | (F)C(F)U(M)C(F)U(M)A(F)C(M)U(F)U(M)C(F)A | NO: |
| | 2831 | (M) | 2903 |
| MB0005 | SEQ ID | C(F)C(M)G(F)C(M)C(F)U(M)G(F)C(M)G(F)C(M)C | SEQ ID |
| | NO: | (F)U(F)C(M)U(F)A(M)C(F)U(M)U(F)C(M)A(F)C | NO: |
| | 2832 | (M) | 2904 |
| MB0006 | SEQ ID | C(F)G(M)C(F)C(M)U(F)G(M)C(F)G(M)C(F)C(M)U | SEQ ID |
| | NO: | (F)C(F)U(M)A(F)C(M)U(F)U(M)C(F)A(M)C(F)C | NO: |
| | 2833 | (M) | 2905 |
| MB0007 | SEQ ID | C(F)C(M)U(F)C(M)U(F)A(M)C(F)U(M)U(F)C(M)A | SEQ ID |
| | NO: | (F)C(F)C(M)C(F)A(M)C(F)U(M)U(F)C(M)G(F)A | NO: |
| | 2834 | (M) | 2906 |
| MB0008 | SEQ ID | C(F)U(M)C(F)U(M)A(F)C(M)U(F)U(M)C(F)A(M)C | SEQ ID |
| | NO: | (F)C(F)C(M)A(F)C(M)U(F)U(M)C(F)G(M)A(F)C | NO: |
| | 2835 | (M) | 2907 |
| MB0009 | SEQ ID | C(F)U(M)G(F)C(M)G(F)A(M)G(F)U(M)A(F)C(M)G | SEQ ID |
| | NO: | (F)A(F)C(M)U(F)U(M)C(F)G(M)U(F)C(M)A(F)A | NO: |
| | 2836 | (M) | 2908 |
| MB0010 | SEQ ID | A(F)C(M)A(F)C(M)U(F)U(M)U(F)C(M)U(F)A(M)C | SEQ ID |
| | NO: | (F)U(F)C(M)G(F)C(M)U(F)G(M)G(F)G(M)C(F)U | NO: |
| | 2837 | (M) | 2909 |
| MB0011 | SEQ ID | G(F)G(M)G(F)C(M)U(F)C(M)C(F)A(M)G(F)C(M)C | SEQ ID |
| | NO: | (F)U(F)G(M)G(F)A(M)C(F)A(M)U(F)U(M)A(F)C | NO: |
| | 2838 | (M) | 2910 |
| MB0012 | SEQ ID | G(F)C(M)C(F)U(M)G(F)G(M)A(F)C(M)A(F)U(M)U | SEQ ID |
| | NO: | (F)A(F)C(M)C(F)U(M)U(F)C(M)C(F)G(M)C(F)U | NO: |
| | 2839 | (M) | 2911 |
| MB0013 | SEQ ID | G(F)G(M)G(F)U(M)U(F)C(M)G(F)A(M)G(F)G(M)C | SEQ ID |
| | NO: | (F)C(F)U(M)U(F)C(M)U(F)A(M)U(F)G(M)C(F)A | NO: |
| | 2840 | (M) | 2912 |
| MB0014 | SEQ ID | G(F)C(M)A(F)G(M)C(F)C(M)G(F)A(M)G(F)G(M)A | SEQ ID |
| | NO: | (F)C(F)A(M)U(F)U(M)G(F)A(M)C(F)G(M)A(F)G | NO: |
| | 2841 | (M) | 2913 |
| MB0015 | SEQ ID | C(F)C(M)U(F)G(M)U(F)G(M)U(F)C(M)C(F)C(M)U | SEQ ID |
| | NO: | (F)A(F)C(M)G(F)A(M)C(F)U(M)U(F)U(M)C(F)U | NO: |
| | 2842 | (M) | 2914 |
| MB0016 | SEQ ID | C(F)U(M)A(F)C(M)G(F)A(M)C(F)U(M)U(F)U(M)C | SEQ ID |
| | NO: | (F)U(F)C(M)A(F)A(M)G(F)A(M)U(F)U(M)C(F)A | NO: |
| | 2843 | (M) | 2915 |
| MB0017 | SEQ ID | U(F)U(M)C(F)U(M)C(F)A(M)A(F)G(M)A(F)U(M)U | SEQ ID |
| | NO: | (F)C(F)A(M)A(F)A(M)C(F)A(M)G(F)A(M)C(F)A | NO: |
| | 2844 | (M) | 2916 |
| MB0018 | SEQ ID | U(F)C(M)U(F)C(M)A(F)A(M)G(F)A(M)U(F)U(M)C | SEQ ID |
| | NO: | (F)A(F)A(M)A(F)C(M)A(F)G(M)A(F)C(M)A(F)G | NO: |
| | 2845 | (M) | 2917 |
| MB0019 | SEQ ID | U(F)C(M)A(F)C(M)A(F)G(M)A(F)U(M)G(F)A(M)A | SEQ ID |
| | NO: | (F)U(F)C(M)A(F)G(M)G(F)A(M)G(F)A(M)C(F)C | NO: |
| | 2846 | (M) | 2918 |
| MB0020 | SEQ ID | C(F)C(M)A(F)A(M)A(F)U(M)A(F)C(M)A(F)U(M)C | SEQ ID |
| | NO: | (F)C(F)U(M)G(F)A(M)A(F)A(M)G(F)A(M)C(F)A | NO: |
| | 2847 | (M) | 2919 |
| MB0021 | SEQ ID | C(F)C(M)U(F)G(M)A(F)A(M)A(F)G(M)A(F)C(M)A | SEQ ID |
| | NO: | (F)G(F)C(M)U(F)U(M)C(F)U(M)C(F)C(M)A(F)U | NO: |
| | 2848 | (M) | 2920 |
| MB0022 | SEQ ID | G(F)A(M)C(F)U(M)G(F)G(M)C(F)U(M)A(F)U(M)G | SEQ ID |
| | NO: | (F)A(F)G(M)C(F)U(M)U(F)C(M)U(F)G(M)C(F)A | NO: |
| | 2849 | (M) | 2921 |
| MB0023 | SEQ ID | C(F)U(M)A(F)C(M)A(F)A(M)A(F)G(M)C(F)U(M)G | SEQ ID |
| | NO: | (F)U(F)G(M)A(F)U(M)U(F)C(M)A(F)G(M)U(F)A | NO: |
| | 2850 | (M) | 2922 |
| MB0024 | SEQ ID | U(F)A(M)C(F)A(M)A(F)A(M)G(F)C(M)U(F)G(M)U | SEQ ID |
| | NO: | (F)G(F)A(M)U(F)U(M)C(F)A(M)G(F)U(M)A(F)C | NO: |
| | 2851 | (M) | 2923 |
| MB0025 | SEQ ID | A(F)C(M)A(F)A(M)A(F)G(M)C(F)U(M)G(F)U(M)G | SEQ ID |
| | NO: | (F)A(F)U(M)U(F)C(M)A(F)G(M)U(F)A(M)C(F)A | NO: |
| | 2852 | (M) | 2924 |
| MB0026 | SEQ ID | G(F)U(M)G(F)A(M)U(F)U(M)C(F)A(M)G(F)U(M)A | SEQ ID |
| | NO: | (F)C(F)A(M)G(F)C(M)U(F)G(M)U(F)G(M)A(F)A | NO: |
| | 2853 | (M) | 2925 |
| MB0027 | SEQ ID | U(F)U(M)C(F)A(M)G(F)U(M)A(F)C(M)A(F)G(M)C | SEQ ID |
| | NO: | (F)U(F)G(M)U(F)G(M)A(F)A(M)G(F)A(M)G(F)A | NO: |
| | 2854 | (M) | 2926 |
| MB0028 | SEQ ID | C(F)A(M)G(F)U(M)A(F)C(M)A(F)G(M)C(F)U(M)G | SEQ ID |
| | NO: | (F)U(F)G(M)A(F)A(M)G(F)A(M)G(F)A(M)C(F)C | NO: |
| | 2855 | (M) | 2927 |
| MB0029 | SEQ ID | U(F)A(M)C(F)A(M)G(F)C(M)U(F)G(M)U(F)G(M)A | SEQ ID |
| | NO: | (F)A(F)G(M)A(F)G(M)A(F)C(M)C(F)U(M)U(F)C | NO: |
| | 2856 | (M) | 2928 |
| MB0030 | SEQ ID | G(F)C(M)U(F)G(M)U(F)G(M)A(F)A(M)G(F)A(M)G | SEQ ID |
| | NO: | (F)A(F)C(M)C(F)U(M)U(F)C(M)U(F)A(M)C(F)A | NO: |
| | 2857 | (M) | 2929 |
| MB0031 | SEQ ID | C(F)U(M)G(F)U(M)G(F)A(M)A(F)G(M)A(F)G(M)A | SEQ ID |
| | NO: | (F)C(F)C(M)U(F)U(M)C(F)U(M)A(F)C(M)A(F)C | NO: |
| | 2858 | (M) | 2930 |
| MB0032 | SEQ ID | G(F)U(M)G(F)A(M)A(F)G(M)A(F)G(M)A(F)C(M)C | SEQ ID |
| | NO: | (F)U(F)U(M)C(F)U(M)A(F)C(M)A(F)C(M)A(F)A | NO: |
| | 2859 | (M) | 2931 |
| MB0033 | SEQ ID | A(F)A(M)U(F)G(M)A(F)A(M)A(F)G(M)U(F)G(M)A | SEQ ID |
| | NO: | (F)A(F)U(M)G(F)A(M)U(F)G(M)G(F)U(M)A(F)A | NO: |
| | 2860 | (M) | 2932 |
| MB0034 | SEQ ID | A(F)G(M)U(F)G(M)A(F)A(M)U(F)G(M)A(F)U(M)G | SEQ ID |
| | NO: | (F)G(F)U(M)A(F)A(M)A(F)U(M)A(F)U(M)G(F)U | NO: |
| | 2861 | (M) | 2933 |
| MB0035 | SEQ ID | A(F)A(M)A(F)U(M)A(F)U(M)G(F)U(M)G(F)U(M)G | SEQ ID |
| | NO: | (F)U(F)G(M)A(F)G(M)G(F)C(M)U(F)G(M)A(F)U | NO: |
| | 2862 | (M) | 2934 |
| MB0034 | SEQ ID | A(F)G(M)U(F)G(M)A(F)A(M)U(F)G(M)A(F)U(M)G | SEQ ID |
| | NO: | (F)G(F)U(M)A(F)A(M)A(F)U(M)A(F)U(M)G(F)U | NO: |
| | 2861 | (M) | 2933 |
| MB0035 | SEQ ID | A(F)A(M)A(F)U(M)A(F)U(M)G(F)U(M)G(F)U(M)G | SEQ ID |
| | NO: | (F)U(F)G(M)A(F)G(M)G(F)C(M)U(F)G(M)A(F)U | NO: |
| | 2862 | (M) | 2934 |
| MB0036 | SEQ ID | A(F)U(M)G(F)U(M)G(F)U(M)G(F)U(M)G(F)A(M)G | SEQ ID |
| | NO: | (F)G(F)C(M)U(F)G(M)A(F)U(M)G(F)G(M)A(F)U | NO: |
| | 2863 | (M) | 2935 |
| MB0037 | SEQ ID | U(F)G(M)U(F)G(M)U(F)G(M)U(F)G(M)A(F)G(M)G | SEQ ID |
| | NO: | (F)C(F)U(M)G(F)A(M)U(F)G(M)G(F)A(M)U(F)U | NO: |
| | 2864 | (M) | 2936 |
| MB0038 | SEQ ID | G(F)U(M)G(F)U(M)G(F)U(M)G(F)A(M)G(F)G(M)C | SEQ ID |
| | NO: | (F)U(F)G(M)A(F)U(M)G(F)G(M)A(F)U(M)U(F)C | NO: |
| | 2865 | (M) | 2937 |
| MB0039 | SEQ ID | U(F)G(M)U(F)G(M)U(F)G(M)A(F)G(M)G(F)C(M)U | SEQ ID |
| | NO: | (F)G(F)A(M)U(F)G(M)G(F)A(M)U(F)U(M)C(F)U | NO: |
| | 2866 | (M) | 2938 |
| MB0040 | SEQ ID | G(F)U(M)G(F)A(M)G(F)G(M)C(F)U(M)G(F)A(M)U | SEQ ID |
| | NO: | (F)G(F)G(M)A(F)U(M)U(F)C(M)U(F)G(M)G(F)A | NO: |
| | 2867 | (M) | 2939 |
| MB0041 | SEQ ID | A(F)G(M)G(F)C(M)U(F)G(M)A(F)U(M)G(F)G(M)A | SEQ ID |
| | NO: | (F)U(F)U(M)C(F)U(M)G(F)G(M)A(F)C(M)G(F)A | NO: |
| | 2868 | (M) | 2940 |
| MB0042 | SEQ ID | C(F)U(M)G(F)A(M)U(F)G(M)G(F)A(M)U(F)U(M)C | SEQ ID |
| | NO: | (F)U(F)G(M)G(F)A(M)C(F)G(M)A(F)G(M)C(F)U | NO: |
| | 2869 | (M) | 2941 |
| MB0043 | SEQ ID | C(F)U(M)G(F)G(M)A(F)C(M)G(F)A(M)G(F)C(M)U | SEQ ID |
| | NO: | (F)C(F)C(M)A(F)A(M)A(F)G(M)G(F)A(M)G(F)A | NO: |
| | 2870 | (M) | 2942 |
| MB0044 | SEQ ID | A(F)G(M)C(F)U(M)C(F)C(M)A(F)A(M)A(F)G(M)G | SEQ ID |
| | NO: | (F)A(F)G(M)A(F)A(M)A(F)A(M)A(F)U(M)C(F)A | NO: |
| | 2871 | (M) | 2943 |
| MB0045 | SEQ ID | A(F)G(M)G(F)G(M)C(F)A(M)A(F)A(M)A(F)G(M)G | SEQ ID |
| | NO: | (F)C(F)A(M)A(F)A(M)A(F)C(M)C(F)U(M)G(F)G | NO: |
| | 2872 | (M) | 2944 |
| MB0046 | SEQ ID | A(F)A(M)A(F)A(M)G(F)G(M)C(F)A(M)A(F)A(M)A | SEQ ID |
| | NO: | (F)C(F)C(M)U(F)G(M)G(F)U(M)G(F)A(M)U(F)U | NO: |
| | 2873 | (M) | 2945 |
| MB0047 | SEQ ID | A(F)A(M)A(F)G(M)G(F)C(M)A(F)A(M)A(F)A(M)C | SEQ ID |
| | NO: | (F)C(F)U(M)G(F)G(M)U(F)G(M)A(F)U(M)U(F)U | NO: |
| | 2874 | (M) | 2946 |
| MB0048 | SEQ ID | A(F)A(M)G(F)G(M)C(F)A(M)A(F)A(M)A(F)C(M)C | SEQ ID |
| | NO: | (F)U(F)G(M)G(F)U(M)G(F)A(M)U(F)U(M)U(F)U | NO: |
| | 2875 | (M) | 2947 |
| MB0049 | SEQ ID | A(F)C(M)C(F)U(M)G(F)G(M)U(F)G(M)A(F)U(M)U | SEQ ID |
| | NO: | (F)U(F)U(M)C(F)C(M)U(F)U(M)G(F)G(M)C(F)A | NO: |
| | 2876 | (M) | 2948 |
| MB0050 | SEQ ID | C(F)C(M)U(F)G(M)G(F)U(M)G(F)A(M)U(F)U(M)U | SEQ ID |
| | NO: | (F)U(F)C(M)C(F)U(M)U(F)G(M)G(F)C(M)A(F)A | NO: |
| | 2877 | (M) | 2949 |
| M30051 | SEQ ID | U(F)G(M)G(F)U(M)G(F)A(M)U(F)U(M)U(F)U(M)C | SEQ ID |
| | NO: | (F)C(F)U(M)U(F)G(M)G(F)C(M)A(F)A(M)G(F)U | NO: |
| | 2878 | (M) | 2950 |
| MB0052 | SEQ ID | U(F)U(M)C(F)C(M)U(F)U(M)G(F)G(M)C(F)A(M)A | SEQ ID |
| | NO: | (F)G(F)U(M)C(F)C(M)U(F)G(M)A(F)U(M)A(F)U | NO: |
| | 2879 | (M) | 2951 |
| MB0053 | SEQ ID | U(F)U(M)G(F)G(M)C(F)A(M)A(F)G(M)U(F)C(M)C | SEQ ID |
| | NO: | (F)U(F)G(M)A(F)U(M)A(F)U(M)U(F)A(M)G(F)G | NO: |
| | 2880 | (M) | 2952 |
| MB0054 | SEQ ID | A(F)G(M)C(F)A(M)G(F)G(M)U(F)G(M)C(F)A(M)C | SEQ ID |
| | NO: | (F)U(F)U(M)U(F)U(M)A(F)U(M)A(F)U(M)G(F)A | NO: |
| | 2881 | (M) | 2953 |
| MB0055 | SEQ ID | C(F)A(M)G(F)G(M)U(F)G(M)C(F)A(M)C(F)U(M)U | SEQ ID |
| | NO: | (F)U(F)U(M)A(F)U(M)A(F)U(M)G(F)A(M)C(F)A | NO: |
| | 2882 | (M) | 2954 |
| MB0056 | SEQ ID | U(F)A(M)A(F)C(M)A(F)G(M)C(F)U(M)G(F)C(M)U | SEQ ID |
| | NO: | (F)C(F)A(M)U(F)G(M)C(F)C(M)G(F)U(M)C(F)U | NO: |
| | 2883 | (M) | 2955 |
| MB0057 | SEQ ID | U(F)U(M)C(F)G(M)A(F)A(M)U(F)G(M)G(F)G(M)C | SEQ ID |
| | NO: | (F)A(F)C(M)C(F)C(M)U(F)G(M)A(F)A(M)A(F)A | NO: |
| | 2884 | (M) | 2956 |
| MB0058 | SEQ ID | A(F)C(M)C(F)C(M)U(F)G(M)A(F)A(M)A(F)A(M)G | SEQ ID |
| | NO: | (F)A(F)C(M)U(F)A(M)U(F)C(M)A(F)C(M)C(F)U | NO: |
| | 2885 | (M) | 2957 |
| MB0059 | SEQ ID | U(F)A(M)U(F)A(M)C(F)U(M)C(F)A(M)U(F)G(M)A | SEQ ID |
| | NO: | (F)U(F)G(M)C(F)U(M)G(F)G(M)C(F)U(M)U(F)U | NO: |
| | 2886 | (M) | 2958 |
| MB0060 | SEQ ID | U(F)A(M)C(F)U(M)C(F)A(M)U(F)G(M)A(F)U(M)G | SEQ ID |
| | NO: | (F)C(F)U(M)G(F)G(M)C(F)U(M)U(F)U(M)G(F)A | NO: |
| | 2887 | (M) | 2959 |
| MB0061 | SEQ ID | U(F)C(M)A(F)U(M)G(F)A(M)U(F)G(M)C(F)U(M)G | SEQ ID |
| | NO: | (F)G(F)C(M)U(F)U(M)U(F)G(M)A(F)C(M)A(F)A | NO: |
| | 2888 | (M) | 2960 |
| MB0062 | SEQ ID | A(F)U(M)G(F)A(M)U(F)G(M)C(F)U(M)G(F)G(M)C | SEQ ID |
| | NO: | (F)U(F)U(M)U(F)G(M)A(F)C(M)A(F)A(M)U(F)G | NO: |
| | 2889 | (M) | 2961 |
| MB0063 | SEQ ID | U(F)G(M)A(F)U(M)G(F)C(M)U(F)G(M)G(F)C(M)U | SEQ ID |
| | NO: | (F)U(F)U(M)G(F)A(M)C(F)A(M)A(F)U(M)G(F)A | NO: |
| | 2890 | (M) | 2962 |
| MB0064 | SEQ ID | A(F)U(M)G(F)C(M)U(F)G(M)G(F)C(M)U(F)U(M)U | SEQ ID |
| | NO: | (F)G(F)A(M)C(F)A(M)A(F)U(M)G(F)A(M)C(F)A | NO: |
| | 2891 | (M) | 2963 |
| MB0065 | SEQ ID | U(F)G(M)C(F)U(M)G(F)G(M)C(F)U(M)U(F)U(M)G | SEQ ID |
| | NO: | (F)A(F)C(M)A(F)A(M)U(F)G(M)A(F)C(M)A(F)U | NO: |
| | 2892 | (M) | 2964 |
| MB0066 | SEQ ID | G(F)C(M)U(F)G(M)G(F)C(M)U(F)U(M)U(F)G(M)A | SEQ ID |
| | NO: | (F)C(F)A(M)A(F)U(M)G(F)A(M)C(F)A(M)U(F)A | NO: |
| | 2893 | (M) | 2965 |
| MB0067 | SEQ ID | G(F)G(M)C(F)U(M)U(F)U(M)G(F)A(M)C(F)A(M)A | SEQ ID |
| | NO: | (F)U(F)G(M)A(F)C(M)A(F)U(M)A(F)G(M)C(F)A | NO: |
| | 2894 | (M) | 2966 |
| MB0068 | SEQ ID | U(F)U(M)G(F)A(M)C(F)A(M)A(F)U(M)G(F)A(M)C | SEQ ID |
| | NO: | (F)A(F)U(M)A(F)G(M)C(F)A(M)C(F)U(M)G(F)A | NO: |
| | 2895 | (M) | 2967 |
| MB0069 | SEQ ID | A(F)U(M)G(F)A(M)C(F)A(M)U(F)A(M)G(F)C(M)A | SEQ ID |
| | NO: | (F)C(F)U(M)G(F)A(M)U(F)U(M)A(F)A(M)A(F)U | NO: |
| | 2896 | (M) | 2968 |
| MB0070 | SEQ ID | A(F)U(M)A(F)G(M)C(F)A(M)C(F)U(M)G(F)A(M)U | SEQ ID |
| | NO: | (F)U(F)A(M)A(F)A(M)U(F)U(M)G(F)A(M)A(F)U | NO: |
| | 2897 | (M) | 2969 |
| MB0071 | SEQ ID | A(F)A(M)U(F)A(M)A(F)C(M)A(F)A(M)A(F)G(M)U | SEQ ID |
| | NO: | (F)U(F)G(M)U(F)A(M)A(F)U(M)C(F)A(M)A(F)U | NO: |
| | 2898 | (M) | 2970 |
| MB0072 | SEQ ID | A(F)A(M)G(F)U(M)U(F)G(M)U(F)A(M)A(F)U(M)C | SEQ ID |
| | NO: | (F)A(F)A(M)U(F)A(M)G(F)C(M)A(F)A(M)C(F)A | NO: |
| | 2899 | (M) | 2971 |

| double | | | |
|---|---|---|---|
| stranded | | | |
| nucleic | | relative | |
| acid | antisense strand sequence | expression | |
| number | (5′--->3′) | level | note |
| MB0001 | G(F)U(M)U(F)C(M)A(F)G(M)G(F)C(M)C(F) | 0.598 | |
| | A(M)C(M)U(F)U(M)C(F)G(M)G(F)G(M)C(F) | | |
| | C(M)C(F)A(M)A(F)G(M) | | |
| MB0002 | A(F)C(M)A(F)G(M)G(F)U(M)U(F)C(M)A(F) | 0.464 | |
| | G(M)G(M)C(F)C(M)A(F)C(M)U(F)U(M)C(F) | | |
| | G(M)G(F)G(M)C(F)C(M) | | |
| MB0003 | U(F)C(M)A(F)G(M)G(F)G(M)U(F)C(M)C(F) | 0.492 | |
| | A(M)G(M)C(F)G(M)C(F)C(M)G(F)C(M)U(F) | | |
| | C(M)C(F)U(M)G(F)G(M) | | |
| MB0004 | U(F)G(M)A(F)A(M)G(F)U(M)A(F)G(M)A(F) | 0.400 | |
| | G(M)G(M)C(F)G(M)C(F)A(M)G(F)G(M)C(F) | | |
| | G(M)G(F)U(M)A(F)G(M) | | |
| MB0005 | G(F)U(M)G(F)A(M)A(F)G(M)U(F)A(M)G(F) | 0.397 | |
| | A(M)G(M)G(F)C(M)G(F)C(M)A(F)G(M)G(F) | | |
| | C(M)G(F)G(M)U(F)A(M) | | |
| MB0006 | G(F)G(M)U(F)G(M)A(F)A(M)G(F)U(M)A(F) | 0.327 | |
| | G(M)A(M)G(F)G(M)C(F)G(M)C(F)A(M)G(F) | | |
| | G(M)C(F)G(M)G(F)U(M) | | |
| MB0007 | U(F)C(M)G(F)A(M)A(F)G(M)U(F)G(M)G(F) | 0.437 | |
| | G(M)U(M)G(F)A(M)A(F)G(M)U(F)A(M)G(F) | | |
| | A(M)G(F)G(M)C(F)G(M) | | |
| MB0008 | G(F)U(M)C(F)G(M)A(F)A(M)G(F)U(M)G(F) | 0.576 | |
| | G(M)G(M)U(F)G(M)A(F)A(M)G(F)U(M)A(F) | | |
| | G(M)A(F)G(M)G(F)C(M) | | |
| MB0009 | U(F)U(M)G(F)A(M)C(F)G(M)A(F)A(M)G(F) | 0.342 | |
| | U(M)C(M)G(F)U(M)A(F)C(M)U(F)C(M)G(F) | | |
| | C(M)A(F)G(M)A(F)G(M) | | |
| MB0010 | A(F)G(M)C(F)C(M)C(F)A(M)G(F)C(M)G(F) | 0.539 | |
| | A(M)G(M)U(F)A(M)G(F)A(M)A(F)A(M)G(F) | | |
| | U(M)G(F)U(M)C(F)C(M) | | |
| MB0011 | G(F)U(M)A(F)A(M)U(F)G(M)U(F)C(M)C(F) | 0.501 | |
| | A(M)G(M)G(F)C(M)U(F)G(M)G(F)A(M)G(F) | | |
| | C(M)C(F)C(M)A(F)G(M) | | |
| MB0012 | A(F)G(M)C(F)G(M)G(F)A(M)A(F)G(M)G(F) | 0.578 | |
| | U(M)A(M)A(F)U(M)G(F)U(M)C(F)C(M)A(F) | | |
| | G(M)G(F)C(M)U(F)G(M) | | |
| MB0013 | U(F)G(M)C(F)A(M)U(F)A(M)G(F)A(M)A(F) | 0.426 | |
| | G(M)G(M)C(F)C(M)U(F)C(M)G(F)A(M)A(F) | | |
| | C (M) C (F) C (M) C (F)G (M) | | |
| MB0014 | C(F)U(M)C(F)G(M)U(F)C(M)A(F)A(M)U(F) | 0.393 | |
| | G(M)U(M)C(F)C(M)U(F)C(M)G(F)G(M)C(F) | | |
| | U(M)G(F)C(M)A(F)U(M) | | |
| MB0015 | A(F)G(M)A(F)A(M)A(F)G(M)U(F)C(M)G(F) | 0.432 | |
| | U(M)A(M)G(F)G(M)G(F)A(M)C(F)A(M)C(F) | | |
| | A(M)G(F)G(M)G(F)U(M) | | |
| MB0016 | U(F)G(M)A(F)A(M)U(F)C(M)U(F)U(M)G(F) | 0.529 | |
| | A(M)G(M)A(F)A(M)A(F)G(M)U(F)C(M)G(F) | | |
| | U(M)A(F)G(M)G(F)G(M) | | |
| MB0017 | U(F)G(M)U(F)C(M)U(F)G(M)U(F)U(M)U(F) | 0.344 | |
| | G(M)A(M)A(F)U(M)C(F)U(M)U(F)G(M)A(F) | | |
| | G(M)A(F)A(M)A(F)G(M) | | |
| MB0018 | C(F)U(M)G(F)U(M)C(F)U(M)G(F)U(M)U(F) | 0.213 | |
| | U(M)G(M)A(F)A(M)U(F)C(M)U(F)U(M)G(F) | | |
| | A(M)G(F)A(M)A(F)A(M) | | |
| MB0019 | G(F)G(M)U(F)C(M)U(F)C(M)C(F)U(M)G(F) | 0.245 | |
| | A(M)U(M)U(F)C(M)A(F)U(M)C(F)U(M)G(F) | | |
| | U(M)G(F)A(M)C(F)A(M) | | |
| MB0020 | U(F)G(M)U(F)C(M)U(F)U(M)U(F)C(M)A(F) | 0.505 | |
| | G(M)G(M)A(F)U(M)G(F)U(M)A(F)U(M)U(F) | | |
| | U(M)G(F)G(M)C(F)U(M) | | |
| MB0021 | A(F)U(M)G(F)G(M)A(F)G(M)A(F)A(M)G(F) | 0.534 | |
| | C(M)U(M)G(F)U(M)C(F)U(M)U(F)U(M)C(F) | | |
| | A(M)G(F)G(M)A(F)U(M) | | |
| MB0022 | U(F)G(M)C(F)A(M)G(F)A(M)A(F)G(M)C(F) | 0.431 | |
| | U(M)C(M)A(F)U(M)A(F)G(M)C(F)C(M)A(F) | | |
| | G(M)U(F)C(M)U(F)C(M) | | |
| MB0023 | U(F)A(M)C(F)U(M)G(F)A(M)A(F)U(M)C(F) | 0.211 | |
| | A(M)C(M)A(F)G(M)C(F)U(M)U(F)U(M)G(F) | | |
| | U(M)A(F)G(M)G(F)U(M) | | |
| MB0024 | G(F)U(M)A(F)C(M)U(F)G(M)A(F)A(M)U(F) | 0.296 | |
| | C(M)A(M)C(F)A(M)G(F)C(M)U(F)U(M)U(F) | | |
| | G(M)U(F)A(M)G(F)G(M) | | |
| MB0025 | U(F)G(M)U(F)A(M)C(F)U(M)G(F)A(M)A(F) | 0.188 | |
| | U(M)C(M)A(F)C(M)A(F)G(M)C(F)U(M)U(F) | | |
| | U(M)G(F)U(M)A(F)G(M) | | |
| MB0026 | U(F)U(M)C(F)A(M)C(F)A(M)G(F)C(M)U(F) | 0.326 | |
| | G(M)U(M)A(F)C(M)U(F)G(M)A(F)A(M)U(F) | | |
| | C(M)A(F)C(M)A(F)G(M) | | |
| MB0027 | U(F)C(M)U(F)C(M)U(F)U(M)C(F)A(M)C(F) | 0.480 | |
| | A(M)G(M)C(F)U(M)G(F)U(M)A(F)C(M)U(F) | | |
| | G(M)A(F)A(M)U(F)C(M) | | |
| MB0028 | G(F)G(M)U(F)C(M)U(F)C(M)U(F)U(M)C(F) | 0.347 | |
| | A(M)C(M)A(F)G(M)C(F)U(M)G(F)U(M)A(F) | | |
| | C(M)U(F)G(M)A(F)A(M) | | |
| MB0029 | G(F)A(M)A(F)G(M)G(F)U(M)C(F)U(M)C(F) | 0.327 | |
| | U(M)U(M)C(F)A(M)C(F)A(M)G(F)C(M)U(F) | | |
| | G(M)U(F)A(M)C(F)U(M) | | |
| MB0030 | U(F)G(M)U(F)A(M)G(F)A(M)A(F)G(M)G(F) | 0.235 | |
| | U(M)C(M)U(F)C(M)U(F)U(M)C(F)A(M)C(F) | | |
| | A(M)G(F)C(M)U(F)G(M) | | |
| MB0031 | G(F)U(M)G(F)U(M)A(F)G(M)A(F)A(M)G(F) | 0.577 | |
| | G(M)U(M)C(F)U(M)C(F)U(M)U(F)C(M)A(F) | | |
| | C(M)A(F)G(M)C(F)U(M) | | |
| MB0032 | U(F)U(M)G(F)U(M)G(F)U(M)A(F)G(M)A(F) | 0.336 | |
| | A(M)G(M)G(F)U(M)C(F)U(M)C(F)U(M)U(F) | | |
| | C(M)A(F)C(M)A(F)G(M) | | |
| MB0033 | U(F)U(M)A(F)C(M)C(F)A(M)U(F)C(M)A(F) | 0.200 | |
| | U(M)U(M)C(F)A(M)C(F)U(M)U(F)U(M)C(F) | | |
| | A(M)U(F)U(M)G(F)U(M) | | |
| MB0034 | A(F)C(M)A(F)U(M)A(F)U(M)U(F)U(M)A(F) | 0.362 | |
| | C(M)C(M)A(F)U(M)C(F)A(M)U(F)U(M)C(F) | | |
| | A(M)C(F)U(M)U(F)U(M) | | |
| MB0035 | A(F)U(M)C(F)A(M)G(F)C(M)C(F)U(M)C(F) | 0.252 | |
| | A(M)C(M)A(F)C(M)A(F)C(M)A(F)U(M)A(F) | | |
| | U(M)U(F)U(M)A(F)C(M) | | |
| MB0034 | A(F)C(M)A(F)U(M)A(F)U(M)U(F)U(M)A(F) | 0.362 | |
| | C(M)C(M)A(F)U(M)C(F)A(M)U(F)U(M)C(F) | | |
| | A(M)C(F)U(M)U(F)U(M) | | |
| MB0035 | A(F)U(M)C(F)A(M)G(F)C(M)C(F)U(M)C(F) | 0.252 | |
| | A(M)C(M)A(F)C(M)A(F)C(M)A(F)U(M)A(F) | | |
| | U(M)U(F)U(M)A(F)C(M) | | |
| MB0036 | A(F)U(M)C(F)C(M)A(F)U(M)C(F)A(M)G(F) | 0.567 | |
| | C(M)C(M)U(F)C(M)A(F)C(M)A(F)C(M)A(F) | | |
| | C(M)A(F)U(M)A(F)U(M) | | |
| MB0037 | A(F)A(M)U(F)C(M)C(F)A(M)U(F)C(M)A(F) | 0.277 | |
| | G(M)C(M)C(F)U(M)C(F)A(M)C(F)A(M)C(F) | | |
| | A(M)C(F)A(M)U(F)A(M) | | |
| MB0038 | G(F)A(M)A(F)U(M)C(F)C(M)A(F)U(M)C(F) | 0.325 | * |
| | A(M)G(M)C(F)C(M)U(F)C(M)A(F)C(M)A(F) | | |
| | C(M)A(F)C(M)A(F)U(M) | | |
| MB0039 | A(F)G(M)A(F)A(M)U(F)C(M)C(F)A(M)U(F) | 0.382 | |
| | C(M)A(M)G(F)C(M)C(F)U(M)C(F)A(M)C(F) | | |
| | A(M)C(F)A(M)C(F)A(M) | | |
| MB0040 | U(F)C(M)C(F)A(M)G(F)A(M)A(F)U(M)C(F) | 0.457 | |
| | C(M)A(M)U(F)C(M)A(F)G(M)C(F)C(M)U(F) | | |
| | C(M)A(F)C(M)A(F)C(M) | | |
| MB0041 | U(F)C(M)G(F)U(M)C(F)C(M)A(F)G(M)A(F) | 0.362 | |
| | A(M)U(M)C(F)C(M)A(F)U(M)C(F)A(M)G(F) | | |
| | C(M)C(F)U(M)C(F)A(M) | | |
| MB0042 | A(F)G(M)C(F)U(M)C(F)G(M)U(F)C(M)C(F) | 0.477 | |
| | A(M)G(M)A(F)A(M)U(F)C(M)C(F)A(M)U(F) | | |
| | C(M)A(F)G(M)C(F)C(M) | | |
| MB0043 | U(F)C(M)U(F)C(M)C(F)U(M)U(F)U(M)G(F) | 0.470 | |
| | G(M)A(M)G(F)C(M)U(F)C(M)G(F)U(M)C(F) | | |
| | C(M)A(F)G(M)A(F)A(M) | | |
| MB0044 | U(F)G(M)A(F)U(M)U(F)U(M)U(F)U(M)C(F) | 0.413 | |
| | U(M)C(M)C(F)U(M)U(F)U(M)G(F)G(M)A(F) | | |
| | G(M)C(F)U(M)C(F)G(M) | | |
| MB0045 | C(F)C(M)A(F)G(M)G(F)U(M)U(F)U(M)U(F) | 0.429 | |
| | G(M)C(M)C(F)U(M)U(F)U(M)U(F)G(M)C(F) | | |
| | C(M)C(F)U(M)C(F)C(M) | | |
| MB0046 | A(F)A(M)U(F)C(M)A(F)C(M)C(F)A(M)G(F) | 0.397 | |
| | G(M)U(M)U(F)U(M)U(F)G(M)C(F)C(M)U(F) | | |
| | U(M)U(F)U(M)G(F)C(M) | | |
| MB0047 | A(F)A(M)A(F)U(M)C(F)A(M)C(F)C(M)A(F) | 0.454 | |
| | G(M)G(M)U(F)U(M)U(F)U(M)G(F)C(M)C(F) | | |
| | U(M)U(F)U(M)U(F)G(M) | | |
| MB0048 | A(F)A(M)A(F)A(M)U(F)C(M)A(F)C(M)C(F) | 0.184 | |
| | A(M)G(M)G(F)U(M)U(F)U(M)U(F)G(M)C(F) | | |
| | C(M)U(F)U(M)U(F)U(M) | | |
| MB0049 | U(F)G(M)C(F)C(M)A(F)A(M)G(F)G(M)A(F) | 0.199 | |
| | A(M)A(M)A(F)U(M)C(F)A(M)C(F)C(M)A(F) | | |
| | G(M)G(F)U(M)U(F)U(M) | | |
| MB0050 | U(F)U(M)G(F)C(M)C(F)A(M)A(F)G(M)G(F) | 0.256 | |
| | A(M)A(M)A(F)A(M)U(F)C(M)A(F)C(M)C(F) | | |
| | A(M)G(F)G(M)U(F)U(M) | | |
| M30051 | A(F)C(M)U(F)U(M)G(F)C(M)C(F)A(M)A(F) | 0.366 | |
| | G(M)G(M)A(F)A(M)A(F)A(M)U(F)C(M)A(F) | | |
| | C(M)C(F)A(M)G(F)G(M) | | |
| MB0052 | A(F)U(M)A(F)U(M)C(F)A(M)G(F)G(M)A(F) | 0.347 | |
| | C(M)U(M)U(F)G(M)C(F)C(M)A(F)A(M)G(F) | | |
| | G(M)A(F)A(M)A(F)A(M) | | |
| MB0053 | C(F)C(M)U(F)A(M)A(F)U(M)A(F)U(M)C(F) | 0.287 | |
| | A(M)G(M)G(F)A(M)C(F)U(M)U(F)G(M)C(F) | | |
| | C(M)A(F)A(M)G(F)G(M) | | |
| MB0054 | U(F)C(M)A(F)U(M)A(F)U(M)A(F)A(M)A(F) | 0.357 | |
| | A(M)G(M)U(F)G(M)C(F)A(M)C(F)C(M)U(F) | | |
| | G(M)C(F)U(M)G(F)C(M) | | |
| MB0055 | U(F)G(M)U(F)C(M)A(F)U(M)A(F)U(M)A(F) | 0.246 | |
| | A(M)A(M)A(F)G(M)U(F)G(M)C(F)A(M)C(F) | | |
| | C(M)U(F)G(M)C(F)U(M) | | |
| MB0056 | A(F)G(M)A(F)C(M)G(F)G(M)C(F)A(M)U(F) | 0.497 | |
| | G(M)A(M)G(F)C(M)A(F)G(M)C(F)U(M)G(F) | | |
| | U(M)U(F)A(M)G(F)G(M) | | |
| MB0057 | U(F)U(M)U(F)U(M)C(F)A(M)G(F)G(M)G(F) | 0.524 | |
| | U(M)G(M)C(F)C(M)C(F)A(M)U(F)U(M)C(F) | | |
| | G(M)A(F)A(M)U(F)G(M) | | |
| MB0058 | A(F)G(M)G(F)U(M)G(F)A(M)U(F)A(M)G(F) | 0.557 | |
| | U(M)C(M)U(F)U(M)U(F)U(M)C(F)A(M)G(F) | | |
| | G(M)G(F)U(M)G(F)C(M) | | |
| MB0059 | A(F)A(M)A(F)G(M)C(F)C(M)A(F)G(M)C(F) | 0.241 | |
| | A(M)U(M)C(F)A(M)U(F)G(M)A(F)G(M)U(F) | | |
| | A(M)U(F)A(M)A(F)C(M) | | |
| MB0060 | U(F)C(M)A(F)A(M)A(F)G(M)C(F)C(M)A(F) | 0.453 | |
| | G(M)C(M)A(F)U(M)C(F)A(M)U(F)G(M)A(F) | | |
| | G(M)U(F)A(M)U(F)A(M) | | |
| MB0061 | U(F)U(M)G(F)U(M)C(F)A(M)A(F)A(M)G(F) | 0.493 | |
| | C(M)C(M)A(F)G(M)C(F)A(M)U(F)C(M)A(F) | | |
| | U(M)G(F)A(M)G(F)U(M) | | |
| MB0062 | C(F)A(M)U(F)U(M)G(F)U(M)C(F)A(M)A(F) | 0.240 | |
| | A(M)G(M)C(F)C(M)A(F)G(M)C(F)A(M)U(F) | | |
| | C(M)A(F)U(M)G(F)A(M) | | |
| MB0063 | U(F)C(M)A(F)U(M)U(F)G(M)U(F)C(M)A(F) | 0.211 | |
| | A(M)A(M)G(F)C(M)C(F)A(M)G(F)C(M)A(F) | | |
| | U(M)C(F)A(M)U(F)G(M) | | |
| MB0064 | U(F)G(M)U(F)C(M)A(F)U(M)U(F)G(M)U(F) | 0.440 | |
| | C(M)A(M)A(F)A(M)G(F)C(M)C(F)A(M)G(F) | | |
| | C(M)A(F)U(M)C(F)A(M) | | |
| MB0065 | A(F)U(M)G(F)U(M)C(F)A(M)U(F)U(M)G(F) | 0.253 | |
| | U(M)C(M)A(F)A(M)A(F)G(M)C(F)C(M)A(F) | | |
| | G(M)C(F)A(M)U(F)C(M) | | |
| MB0066 | U(F)A(M)U(F)G(M)U(F)C(M)A(F)U(M)U(F) | 0.189 | |
| | G(M)U(M)C(F)A(M)A(F)A(M)G(F)C(M)C(F) | | |
| | A(M)G(F)C(M)A(F)U(M) | | |
| MB0067 | U(F)G(M)C(F)U(M)A(F)U(M)G(F)U(M)C(F) | 0.253 | |
| | A(M)U(M)U(F)G(M)U(F)C(M)A(F)A(M)A(F) | | |
| | G(M)C(F)C(M)A(F)G(M) | | |
| MB0068 | U(F)C(M)A(F)G(M)U(F)G(M)C(F)U(M)A(F) | 0.392 | |
| | U(M)G(M)U(F)C(M)A(F)U(M)U(F)G(M)U(F) | | |
| | C(M)A(F)A(M)A(F)G(M) | | |
| MB0069 | A(F)U(M)U(F)U(M)A(F)A(M)U(F)C(M)A(F) | 0.316 | |
| | G(M)U(M)G(F)C(M)U(F)A(M)U(F)G(M)U(F) | | |
| | C(M)A(F)U(M)U(F)G(M) | | |
| MB0070 | A(F)U(M)U(F)C(M)A(F)A(M)U(F)U(M)U(F) | 0.269 | |
| | A(M)A(M)U(F)C(M)A(F)G(M)U(F)G(M)C(F) | | |
| | U(M)A(F)U(M)G(F)U(M) | | |
| MB0071 | A(F)U(M)U(F)G(M)A(F)U(M)U(F)A(M)C(F) | 0.359 | |
| | A(M)A(M)C(F)U(M)U(F)U(M)G(F)U(M)U(F) | | |
| | A(M)U(F)U(M)C(F)A(M) | | |
| MB0072 | U(F)G(M)U(F)U(M)G(F)C(M)U(F)A(M)U(F) | 0.561 | |
| | U(M)G(M)A(F)U(M)U(F)A(M)C(F)A(M)A(F) | | |
| | C(M)U(F)U(M)U(F)G(M) | | |

[0081] This application is based on a patent application No. 2017-045226 filed in Japan (filing date: Mar. 9, 2017), the contents of which are incorporated in full herein.

### INDUSTRIAL APPLICABILITY

[0082] The present invention provides a nucleic acid having activity to suppress expression of MASP2, a pharmaceutical composition comprising the nucleic acid as an active ingredient, and the like. The nucleic acid and pharmaceutical composition of the present invention suppress expression of MASP2, and are useful for the treatment or prophylaxis of autoimmune diseases such as APS, SLE and the like and thrombosis in hemodialysis.

The application's sequence listing, which the Patent Office published only in electronic form, follows.

SEQUENCE LISTING (2971 sequences)

SEQ ID NO: 1 - RNA, 21 nt, Artificial Sequence
  siRNA sense strand against MASP2
caggccaggccagcuggacgg

SEQ ID NO: 2 - RNA, 21 nt, Artificial Sequence
  siRNA sense strand against MASP2
gccaggccagcuggacgggca

SEQ ID NO: 3 - RNA, 21 nt, Artificial Sequence
  siRNA sense strand against MASP2
caggccagcuggacgggcaca

SEQ ID NO: 4 - RNA, 21 nt, Artificial Sequence
  siRNA sense strand against MASP2
aggccagcuggacgggcacac

SEQ ID NO: 5 - RNA, 21 nt, Artificial Sequence
  siRNA sense strand against MASP2
ggccagcuggacgggcacacc

SEQ ID NO: 6 - RNA, 21 nt, Artificial Sequence
  siRNA sense strand against MASP2
cagcuggacgggcacaccaug

SEQ ID NO: 7 - RNA, 21 nt, Artificial Sequence
  siRNA sense strand against MASP2
agcuggacgggcacaccauga

SEQ ID NO: 8 - RNA, 21 nt, Artificial Sequence
  siRNA sense strand against MASP2
cuggacgggcacaccaugagg

SEQ ID NO: 9 - RNA, 21 nt, Artificial Sequence
  siRNA sense strand against MASP2
ggacgggcacaccaugaggcu

SEQ ID NO: 10 - RNA, 21 nt, Artificial Sequence
  siRNA sense strand against MASP2
acgggcacaccaugaggcugc

SEQ ID NO: 11 - RNA, 21 nt, Artificial Sequence
  siRNA sense strand against MASP2
cgggcacaccaugaggcugcu

SEQ ID NO: 12 - RNA, 21 nt, Artificial Sequence
  siRNA sense strand against MASP2
gggcacaccaugaggcugcug

SEQ ID NO: 13 - RNA, 21 nt, Artificial Sequence
  siRNA sense strand against MASP2
ggcacaccaugaggcugcuga

SEQ ID NO: 14 - RNA, 21 nt, Artificial Sequence
  siRNA sense strand against MASP2
ccaugaggcugcugacccucc

SEQ ID NO: 15 - RNA, 21 nt, Artificial Sequence
  siRNA sense strand against MASP2
caugaggcugcugacccuccu

SEQ ID NO: 16 - RNA, 21 nt, Artificial Sequence
  siRNA sense strand against MASP2
gaggcugcugacccuccuggg

SEQ ID NO: 17 - RNA, 21 nt, Artificial Sequence
  siRNA sense strand against MASP2
ggcugcugacccuccugggcc

SEQ ID NO: 18 - RNA, 21 nt, Artificial Sequence
  siRNA sense strand against MASP2
gcugcugacccuccugggccu

SEQ ID NO: 19 - RNA, 21 nt, Artificial Sequence
  siRNA sense strand against MASP2
cugcugacccuccugggccuu

SEQ ID NO: 20 - RNA, 21 nt, Artificial Sequence
  siRNA sense strand against MASP2
ugcugacccuccugggccuuc

SEQ ID NO: 21 - RNA, 21 nt, Artificial Sequence
  siRNA sense strand against MASP2
cugacccuccugggccuucug

SEQ ID NO: 22 - RNA, 21 nt, Artificial Sequence
  siRNA sense strand against MASP2
ugacccuccugggccuucugu

SEQ ID NO: 23 - RNA, 21 nt, Artificial Sequence
  siRNA sense strand against MASP2
cccuccugggccuucugugug

SEQ ID NO: 24 - RNA, 21 nt, Artificial Sequence
  siRNA sense strand against MASP2
ccuccugggccuucugugugg

SEQ ID NO: 25 - RNA, 21 nt, Artificial Sequence
  siRNA sense strand against MASP2
cugggccuucuguguggcucg

SEQ ID NO: 26 - RNA, 21 nt, Artificial Sequence
  siRNA sense strand against MASP2
gggccuucuguguggcucggu

SEQ ID NO: 27 - RNA, 21 nt, Artificial Sequence
  siRNA sense strand against MASP2
ggccuucuguguggcucggug

SEQ ID NO: 28 - RNA, 21 nt, Artificial Sequence
  siRNA sense strand against MASP2
ccuucuguguggcucgguggc

SEQ ID NO: 29 - RNA, 21 nt, Artificial Sequence
  siRNA sense strand against MASP2
cuucuguguggcucgguggcc

SEQ ID NO: 30 - RNA, 21 nt, Artificial Sequence
  siRNA sense strand against MASP2
cuguguggcucgguggccacc

SEQ ID NO: 31 - RNA, 21 nt, Artificial Sequence
  siRNA sense strand against MASP2
guguggcucgguggccacccc

SEQ ID NO: 32 - RNA, 21 nt, Artificial Sequence
  siRNA sense strand against MASP2
gcucgguggccacccccuugg

SEQ ID NO: 33 - RNA, 21 nt, Artificial Sequence
  siRNA sense strand against MASP2
cucgguggccacccccuuggg

SEQ ID NO: 34 - RNA, 21 nt, Artificial Sequence
  siRNA sense strand against MASP2
ccacccccuugggcccgaagu

SEQ ID NO: 35 - RNA, 21 nt, Artificial Sequence
  siRNA sense strand against MASP2
cccccuugggcccgaaguggc

SEQ ID NO: 36 - RNA, 21 nt, Artificial Sequence
  siRNA sense strand against MASP2
ggcccgaaguggccugaaccu

SEQ ID NO: 37 - RNA, 21 nt, Artificial Sequence
  siRNA sense strand against MASP2
gcccgaaguggccugaaccug

SEQ ID NO: 38 - RNA, 21 nt, Artificial Sequence
  siRNA sense strand against MASP2
cccgaaguggccugaaccugu

SEQ ID NO: 39 - RNA, 21 nt, Artificial Sequence
  siRNA sense strand against MASP2
ccgaaguggccugaaccugug

SEQ ID NO: 40 - RNA, 21 nt, Artificial Sequence
  siRNA sense strand against MASP2
cgaaguggccugaaccugugu

SEQ ID NO: 41 - RNA, 21 nt, Artificial Sequence
  siRNA sense strand against MASP2
aaguggccugaaccuguguuc

SEQ ID NO: 42 - RNA, 21 nt, Artificial Sequence
  siRNA sense strand against MASP2
aguggccugaaccuguguucg

SEQ ID NO: 43 - RNA, 21 nt, Artificial Sequence
  siRNA sense strand against MASP2
guggccugaaccuguguucgg

SEQ ID NO: 44 - RNA, 21 nt, Artificial Sequence
  siRNA sense strand against MASP2
uggccugaaccuguguucggg

SEQ ID NO: 45 - RNA, 21 nt, Artificial Sequence
  siRNA sense strand against MASP2
ggccugaaccuguguucgggc

SEQ ID NO: 46 - RNA, 21 nt, Artificial Sequence
  siRNA sense strand against MASP2
gccugaaccuguguucgggcg

SEQ ID NO: 47 - RNA, 21 nt, Artificial Sequence
  siRNA sense strand against MASP2
ccugaaccuguguucgggcgc

SEQ ID NO: 48 - RNA, 21 nt, Artificial Sequence
  siRNA sense strand against MASP2
gaaccuguguucgggcgccug

SEQ ID NO: 49 - RNA, 21 nt, Artificial Sequence
  siRNA sense strand against MASP2
accuguguucgggcgccuggc

SEQ ID NO: 50 - RNA, 21 nt, Artificial Sequence
  siRNA sense strand against MASP2
guguucgggcgccuggcaucc

SEQ ID NO: 51 - RNA, 21 nt, Artificial Sequence
  siRNA sense strand against MASP2
ccuggcaucccccggcuuucc

SEQ ID NO: 52 - RNA, 21 nt, Artificial Sequence
  siRNA sense strand against MASP2
cuggcaucccccggcuuucca

SEQ ID NO: 53 - RNA, 21 nt, Artificial Sequence
  siRNA sense strand against MASP2
ccggcuuuccaggggaguaug

SEQ ID NO: 54 - RNA, 21 nt, Artificial Sequence
  siRNA sense strand against MASP2
cggcuuuccaggggaguaugc

SEQ ID NO: 55 - RNA, 21 nt, Artificial Sequence
  siRNA sense strand against MASP2
ggcuuuccaggggaguaugcc

SEQ ID NO: 56 - RNA, 21 nt, Artificial Sequence
  siRNA sense strand against MASP2
uuuccaggggaguaugccaau

SEQ ID NO: 57 - RNA, 21 nt, Artificial Sequence
  siRNA sense strand against MASP2
caggggaguaugccaaugacc

SEQ ID NO: 58 - RNA, 21 nt, Artificial Sequence
  siRNA sense strand against MASP2
aggggaguaugccaaugacca

SEQ ID NO: 59 - RNA, 21 nt, Artificial Sequence
  siRNA sense strand against MASP2
ggggaguaugccaaugaccag

SEQ ID NO: 60 - RNA, 21 nt, Artificial Sequence
  siRNA sense strand against MASP2
gggaguaugccaaugaccagg

SEQ ID NO: 61 - RNA, 21 nt, Artificial Sequence
  siRNA sense strand against MASP2
ggaguaugccaaugaccagga

SEQ ID NO: 62 - RNA, 21 nt, Artificial Sequence
  siRNA sense strand against MASP2
gaguaugccaaugaccaggag

SEQ ID NO: 63 - RNA, 21 nt, Artificial Sequence
  siRNA sense strand against MASP2
gccaaugaccaggagcggcgc

SEQ ID NO: 64 - RNA, 21 nt, Artificial Sequence
  siRNA sense strand against MASP2
ccaaugaccaggagcggcgcu

SEQ ID NO: 65 - RNA, 21 nt, Artificial Sequence
  siRNA sense strand against MASP2
caaugaccaggagcggcgcug

SEQ ID NO: 66 - RNA, 21 nt, Artificial Sequence
  siRNA sense strand against MASP2
augaccaggagcggcgcugga

SEQ ID NO: 67 - RNA, 21 nt, Artificial Sequence
  siRNA sense strand against MASP2
accaggagcggcgcuggaccc

SEQ ID NO: 68 - RNA, 21 nt, Artificial Sequence
  siRNA sense strand against MASP2
ggagcggcgcuggacccugac

SEQ ID NO: 69 - RNA, 21 nt, Artificial Sequence
  siRNA sense strand against MASP2
gagcggcgcuggacccugacu

SEQ ID NO: 70 - RNA, 21 nt, Artificial Sequence
  siRNA sense strand against MASP2
agcggcgcuggacccugacug

SEQ ID NO: 71 - RNA, 21 nt, Artificial Sequence
  siRNA sense strand against MASP2
gcggcgcuggacccugacugc

SEQ ID NO: 72 - RNA, 21 nt, Artificial Sequence
  siRNA sense strand against MASP2
cggcgcuggacccugacugca

SEQ ID NO: 73 - RNA, 21 nt, Artificial Sequence
  siRNA sense strand against MASP2
ggcgcuggacccugacugcac

SEQ ID NO: 74 - RNA, 21 nt, Artificial Sequence
  siRNA sense strand against MASP2
gcgcuggacccugacugcacc

SEQ ID NO: 75 - RNA, 21 nt, Artificial Sequence
  siRNA sense strand against MASP2
cgcuggacccugacugcaccc

SEQ ID NO: 76 - RNA, 21 nt, Artificial Sequence
  siRNA sense strand against MASP2
gcuggacccugacugcacccc

SEQ ID NO: 77 - RNA, 21 nt, Artificial Sequence
  siRNA sense strand against MASP2
ggacccugacugcaccccccg

SEQ ID NO: 78 - RNA, 21 nt, Artificial Sequence
  siRNA sense strand against MASP2
gacccugacugcaccccccgg

SEQ ID NO: 79 - RNA, 21 nt, Artificial Sequence
  siRNA sense strand against MASP2
gacugcaccccccggcuaccg

SEQ ID NO: 80 - RNA, 21 nt, Artificial Sequence
  siRNA sense strand against MASP2
ccggcuaccgccugcgccucu

SEQ ID NO: 81 - RNA, 21 nt, Artificial Sequence
  siRNA sense strand against MASP2
ggcuaccgccugcgccucuac

SEQ ID NO: 82 - RNA, 21 nt, Artificial Sequence
  siRNA sense strand against MASP2
gcuaccgccugcgccucuacu

SEQ ID NO: 83 - RNA, 21 nt, Artificial Sequence
  siRNA sense strand against MASP2
cuaccgccugcgccucuacuu

SEQ ID NO: 84 - RNA, 21 nt, Artificial Sequence
  siRNA sense strand against MASP2
accgccugcgccucuacuuca

SEQ ID NO: 85 - RNA, 21 nt, Artificial Sequence
  siRNA sense strand against MASP2
ccgccugcgccucuacuucac

SEQ ID NO: 86 - RNA, 21 nt, Artificial Sequence
  siRNA sense strand against MASP2
cgccugcgccucuacuucacc

SEQ ID NO: 87 - RNA, 21 nt, Artificial Sequence
  siRNA sense strand against MASP2
gccugcgccucuacuucaccc

SEQ ID NO: 88 - RNA, 21 nt, Artificial Sequence
  siRNA sense strand against MASP2
ccugcgccucuacuucaccca

SEQ ID NO: 89 - RNA, 21 nt, Artificial Sequence
  siRNA sense strand against MASP2
cugcgccucuacuucacccac

SEQ ID NO: 90 - RNA, 21 nt, Artificial Sequence
  siRNA sense strand against MASP2
ugcgccucuacuucacccacu

SEQ ID NO: 91 - RNA, 21 nt, Artificial Sequence
  siRNA sense strand against MASP2
cgccucuacuucacccacuuc

SEQ ID NO: 92 - RNA, 21 nt, Artificial Sequence
  siRNA sense strand against MASP2
gccucuacuucacccacuucg

SEQ ID NO: 93 - RNA, 21 nt, Artificial Sequence
  siRNA sense strand against MASP2
ccucuacuucacccacuucga

SEQ ID NO: 94 - RNA, 21 nt, Artificial Sequence
  siRNA sense strand against MASP2
cucuacuucacccacuucgac

SEQ ID NO: 95 - RNA, 21 nt, Artificial Sequence
  siRNA sense strand against MASP2
ucuacuucacccacuucgacc

SEQ ID NO: 96 - RNA, 21 nt, Artificial Sequence
  siRNA sense strand against MASP2
cuacuucacccacuucgaccu

SEQ ID NO: 97 - RNA, 21 nt, Artificial Sequence
  siRNA sense strand against MASP2
acuucacccacuucgaccugg

SEQ ID NO: 98 - RNA, 21 nt, Artificial Sequence
  siRNA sense strand against MASP2
cuucacccacuucgaccugga

SEQ ID NO: 99 - RNA, 21 nt, Artificial Sequence
  siRNA sense strand against MASP2
ucacccacuucgaccuggagc

SEQ ID NO: 100 - RNA, 21 nt, Artificial Sequence
  siRNA sense strand against MASP2
cccacuucgaccuggagcucu

SEQ ID NO: 101 - RNA, 21 nt, Artificial Sequence
  siRNA sense strand against MASP2
cacuucgaccuggagcucucc

SEQ ID NO: 102 - RNA, 21 nt, Artificial Sequence
  siRNA sense strand against MASP2
cgaccuggagcucucccaccu

SEQ ID NO: 103 - RNA, 21 nt, Artificial Sequence
  siRNA sense strand against MASP2
ccuggagcucucccaccucug

SEQ ID NO: 104 - RNA, 21 nt, Artificial Sequence
  siRNA sense strand against MASP2
ggagcucucccaccucugcga

SEQ ID NO: 105 - RNA, 21 nt, Artificial Sequence
  siRNA sense strand against MASP2
gagcucucccaccucugcgag

SEQ ID NO: 106 - RNA, 21 nt, Artificial Sequence
  siRNA sense strand against MASP2
agcucucccaccucugcgagu

SEQ ID NO: 107 - RNA, 21 nt, Artificial Sequence
  siRNA sense strand against MASP2
ucucccaccucugcgaguacg

SEQ ID NO: 108 - RNA, 21 nt, Artificial Sequence
  siRNA sense strand against MASP2
cucccaccucugcgaguacga

SEQ ID NO: 109 - RNA, 21 nt, Artificial Sequence
  siRNA sense strand against MASP2
cccaccucugcgaguacgacu

SEQ ID NO: 110 - RNA, 21 nt, Artificial Sequence
  siRNA sense strand against MASP2
ccaccucugcgaguacgacuu

SEQ ID NO: 111 - RNA, 21 nt, Artificial Sequence
  siRNA sense strand against MASP2
accucugcgaguacgacuucg

SEQ ID NO: 112 - RNA, 21 nt, Artificial Sequence
  siRNA sense strand against MASP2
ccucugcgaguacgacuucgu

SEQ ID NO: 113 - RNA, 21 nt, Artificial Sequence
  siRNA sense strand against MASP2
ucugcgaguacgacuucguca

SEQ ID NO: 114 - RNA, 21 nt, Artificial Sequence
  siRNA sense strand against MASP2
cugcgaguacgacuucgucaa

SEQ ID NO: 115 - RNA, 21 nt, Artificial Sequence
  siRNA sense strand against MASP2
gcgaguacgacuucgucaagc

SEQ ID NO: 116 - RNA, 21 nt, Artificial Sequence
  siRNA sense strand against MASP2
cgaguacgacuucgucaagcu

SEQ ID NO: 117 - RNA, 21 nt, Artificial Sequence
  siRNA sense strand against MASP2
gaguacgacuucgucaagcug

SEQ ID NO: 118 - RNA, 21 nt, Artificial Sequence
  siRNA sense strand against MASP2
aguacgacuucgucaagcuga

SEQ ID NO: 119 - RNA, 21 nt, Artificial Sequence
  siRNA sense strand against MASP2
guacgacuucgucaagcugag

SEQ ID NO: 120 - RNA, 21 nt, Artificial Sequence
  siRNA sense strand against MASP2
acgacuucgucaagcugagcu

SEQ ID NO: 121 - RNA, 21 nt, Artificial Sequence
  siRNA sense strand against MASP2
cgacuucgucaagcugagcuc

SEQ ID NO: 122 - RNA, 21 nt, Artificial Sequence
  siRNA sense strand against MASP2
gacuucgucaagcugagcucg

SEQ ID NO: 123 - RNA, 21 nt, Artificial Sequence
  siRNA sense strand against MASP2
cgucaagcugagcucgggggc

SEQ ID NO: 124 - RNA, 21 nt, Artificial Sequence
  siRNA sense strand against MASP2
ccaaggugcuggccacgcugu

SEQ ID NO: 125 - RNA, 21 nt, Artificial Sequence
  siRNA sense strand against MASP2
uggccacgcugugcgggcagg

SEQ ID NO: 126 - RNA, 21 nt, Artificial Sequence
  siRNA sense strand against MASP2
ccacgcugugcgggcaggaga

SEQ ID NO: 127 - RNA, 21 nt, Artificial Sequence
  siRNA sense strand against MASP2
gugcgggcaggagagcacaga

SEQ ID NO: 128 - RNA, 21 nt, Artificial Sequence
  siRNA sense strand against MASP2
ggcaggagagcacagacacgg

SEQ ID NO: 129 - RNA, 21 nt, Artificial Sequence
  siRNA sense strand against MASP2
gcaggagagcacagacacgga

SEQ ID NO: 130 - RNA, 21 nt, Artificial Sequence
  siRNA sense strand against MASP2
aggagagcacagacacggagc

SEQ ID NO: 131 - RNA, 21 nt, Artificial Sequence
  siRNA sense strand against MASP2
ggagagcacagacacggagcg

SEQ ID NO: 132 - RNA, 21 nt, Artificial Sequence
  siRNA sense strand against MASP2
gagagcacagacacggagcgg

SEQ ID NO: 133 - RNA, 21 nt, Artificial Sequence
  siRNA sense strand against MASP2
agagcacagacacggagcggg

SEQ ID NO: 134 - RNA, 21 nt, Artificial Sequence
  siRNA sense strand against MASP2
cgggccccuggcaaggacacu

SEQ ID NO: 135 - RNA, 21 nt, Artificial Sequence
  siRNA sense strand against MASP2
gccccuggcaaggacacuuuc

SEQ ID NO: 136 - RNA, 21 nt, Artificial Sequence
  siRNA sense strand against MASP2
cuggcaaggacacuuucuacu

SEQ ID NO: 137 - RNA, 21 nt, Artificial Sequence
  siRNA sense strand against MASP2
ggcaaggacacuuucuacucg

SEQ ID NO: 138 - RNA, 21 nt, Artificial Sequence
  siRNA sense strand against MASP2
gcaaggacacuuucuacucgc

SEQ ID NO: 139 - RNA, 21 nt, Artificial Sequence
  siRNA sense strand against MASP2
aggacacuuucuacucgcugg

SEQ ID NO: 140 - RNA, 21 nt, Artificial Sequence
  siRNA sense strand against MASP2
ggacacuuucuacucgcuggg

SEQ ID NO: 141 - RNA, 21 nt, Artificial Sequence
  siRNA sense strand against MASP2
gacacuuucuacucgcugggc

SEQ ID NO: 142 - RNA, 21 nt, Artificial Sequence
  siRNA sense strand against MASP2
acacuuucuacucgcugggcu

SEQ ID NO: 143 - RNA, 21 nt, Artificial Sequence
  siRNA sense strand against MASP2
acuuucuacucgcugggcucc

SEQ ID NO: 144 - RNA, 21 nt, Artificial Sequence
  siRNA sense strand against MASP2
cuuucuacucgcugggcucca

SEQ ID NO: 145 - RNA, 21 nt, Artificial Sequence
  siRNA sense strand against MASP2
cucgcugggcuccagccugga

SEQ ID NO: 146 - RNA, 21 nt, Artificial Sequence
  siRNA sense strand against MASP2
cgcugggcuccagccuggaca

SEQ ID NO: 147 - RNA, 21 nt, Artificial Sequence
  siRNA sense strand against MASP2
cugggcuccagccuggacauu

SEQ ID NO: 148 - RNA, 21 nt, Artificial Sequence
  siRNA sense strand against MASP2
ugggcuccagccuggacauua

SEQ ID NO: 149 - RNA, 21 nt, Artificial Sequence
  siRNA sense strand against MASP2
gggcuccagccuggacauuac

SEQ ID NO: 150 - RNA, 21 nt, Artificial Sequence
  siRNA sense strand against MASP2
ggcuccagccuggacauuacc

SEQ ID NO: 151 - RNA, 21 nt, Artificial Sequence
  siRNA sense strand against MASP2
gcuccagccuggacauuaccu

SEQ ID NO: 152 - RNA, 21 nt, Artificial Sequence
  siRNA sense strand against MASP2
cuccagccuggacauuaccuu

SEQ ID NO: 153 - RNA, 21 nt, Artificial Sequence
  siRNA sense strand against MASP2
ccagccuggacauuaccuucc

SEQ ID NO: 154 - RNA, 21 nt, Artificial Sequence
  siRNA sense strand against MASP2
cagccuggacauuaccuuccg

SEQ ID NO: 155 - RNA, 21 nt, Artificial Sequence
  siRNA sense strand against MASP2
gccuggacauuaccuuccgcu

SEQ ID NO: 156 - RNA, 21 nt, Artificial Sequence
  siRNA sense strand against MASP2
ccuggacauuaccuuccgcuc

SEQ ID NO: 157 - RNA, 21 nt, Artificial Sequence
  siRNA sense strand against MASP2
cuggacauuaccuuccgcucc

SEQ ID NO: 158 - RNA, 21 nt, Artificial Sequence
  siRNA sense strand against MASP2
ggacauuaccuuccgcuccga

SEQ ID NO: 159 - RNA, 21 nt, Artificial Sequence
  siRNA sense strand against MASP2
gacauuaccuuccgcuccgac

SEQ ID NO: 160 - RNA, 21 nt, Artificial Sequence
  siRNA sense strand against MASP2
acauuaccuuccgcuccgacu

SEQ ID NO: 161 - RNA, 21 nt, Artificial Sequence
  siRNA sense strand against MASP2
cauuaccuuccgcuccgacua

SEQ ID NO: 162 - RNA, 21 nt, Artificial Sequence
  siRNA sense strand against MASP2
uuaccuuccgcuccgacuacu

SEQ ID NO: 163 - RNA, 21 nt, Artificial Sequence
  siRNA sense strand against MASP2
accuuccgcuccgacuacucc

SEQ ID NO: 164 - RNA, 21 nt, Artificial Sequence
  siRNA sense strand against MASP2
ccuuccgcuccgacuacucca

SEQ ID NO: 165 - RNA, 21 nt, Artificial Sequence
  siRNA sense strand against MASP2
cuuccgcuccgacuacuccaa

SEQ ID NO: 166 - RNA, 21 nt, Artificial Sequence
  siRNA sense strand against MASP2
uccgacuacuccaacgagaag

SEQ ID NO: 167 - RNA, 21 nt, Artificial Sequence
  siRNA sense strand against MASP2
ccgacuacuccaacgagaagc

SEQ ID NO: 168 - RNA, 21 nt, Artificial Sequence
  siRNA sense strand against MASP2
cgacuacuccaacgagaagcc

SEQ ID NO: 169 - RNA, 21 nt, Artificial Sequence
  siRNA sense strand against MASP2
acuccaacgagaagccguuca

SEQ ID NO: 170 - RNA, 21 nt, Artificial Sequence
  siRNA sense strand against MASP2
cuccaacgagaagccguucac

SEQ ID NO: 171 - RNA, 21 nt, Artificial Sequence
  siRNA sense strand against MASP2
acgagaagccguucacggggu

SEQ ID NO: 172 - RNA, 21 nt, Artificial Sequence
  siRNA sense strand against MASP2
cgagaagccguucacgggguu

SEQ ID NO: 173 - RNA, 21 nt, Artificial Sequence
  siRNA sense strand against MASP2
gagaagccguucacgggguuc

SEQ ID NO: 174 - RNA, 21 nt, Artificial Sequence
  siRNA sense strand against MASP2
gaagccguucacgggguucga

SEQ ID NO: 175 - RNA, 21 nt, Artificial Sequence
  siRNA sense strand against MASP2
agccguucacgggguucgagg

SEQ ID NO: 176 - RNA, 21 nt, Artificial Sequence
  siRNA sense strand against MASP2
ccguucacgggguucgaggcc

SEQ ID NO: 177 - RNA, 21 nt, Artificial Sequence
  siRNA sense strand against MASP2
cguucacgggguucgaggccu

SEQ ID NO: 178 - RNA, 21 nt, Artificial Sequence
  siRNA sense strand against MASP2
ucacgggguucgaggccuucu

SEQ ID NO: 179 - RNA, 21 nt, Artificial Sequence
  siRNA sense strand against MASP2
gggguucgaggccuucuaugc

SEQ ID NO: 180 - RNA, 21 nt, Artificial Sequence
  siRNA sense strand against MASP2
ggguucgaggccuucuaugca

SEQ ID NO: 181 - RNA, 21 nt, Artificial Sequence
  siRNA sense strand against MASP2
gguucgaggccuucuaugcag

SEQ ID NO: 182 - RNA, 21 nt, Artificial Sequence
  siRNA sense strand against MASP2
guucgaggccuucuaugcagc

SEQ ID NO: 183 - RNA, 21 nt, Artificial Sequence
  siRNA sense strand against MASP2
ggccuucuaugcagccgagga

SEQ ID NO: 184 - RNA, 21 nt, Artificial Sequence
  siRNA sense strand against MASP2
ucuaugcagccgaggacauug

SEQ ID NO: 185 - RNA, 21 nt, Artificial Sequence
  siRNA sense strand against MASP2
cuaugcagccgaggacauuga

SEQ ID NO: 186 - RNA, 21 nt, Artificial Sequence
  siRNA sense strand against MASP2
uaugcagccgaggacauugac

SEQ ID NO: 187 - RNA, 21 nt, Artificial Sequence
  siRNA sense strand against MASP2
augcagccgaggacauugacg

SEQ ID NO: 188 - RNA, 21 nt, Artificial Sequence
  siRNA sense strand against MASP2
gcagccgaggacauugacgag

SEQ ID NO: 189 - RNA, 21 nt, Artificial Sequence
  siRNA sense strand against MASP2
cagccgaggacauugacgagu

SEQ ID NO: 190 - RNA, 21 nt, Artificial Sequence
  siRNA sense strand against MASP2
agccgaggacauugacgagug

SEQ ID NO: 191 - RNA, 21 nt, Artificial Sequence
  siRNA sense strand against MASP2
gccgaggacauugacgagugc

SEQ ID NO: 192 - RNA, 21 nt, Artificial Sequence
  siRNA sense strand against MASP2
ccgaggacauugacgagugcc

SEQ ID NO: 193 - RNA, 21 nt, Artificial Sequence
  siRNA sense strand against MASP2
cgaggacauugacgagugcca

SEQ ID NO: 194 - RNA, 21 nt, Artificial Sequence
  siRNA sense strand against MASP2
agugccagguggccccgggag

SEQ ID NO: 195 - RNA, 21 nt, Artificial Sequence
  siRNA sense strand against MASP2
ggagaggcgcccaccugcgac

SEQ ID NO: 196 - RNA, 21 nt, Artificial Sequence
  siRNA sense strand against MASP2
gagaggcgcccaccugcgacc

SEQ ID NO: 197 - RNA, 21 nt, Artificial Sequence
  siRNA sense strand against MASP2
cccaccugcgaccaccacugc

SEQ ID NO: 198 - RNA, 21 nt, Artificial Sequence
  siRNA sense strand against MASP2
gcgaccaccacugccacaacc

SEQ ID NO: 199 - RNA, 21 nt, Artificial Sequence
  siRNA sense strand against MASP2
cgaccaccacugccacaacca

SEQ ID NO: 200 - RNA, 21 nt, Artificial Sequence
  siRNA sense strand against MASP2
accaccacugccacaaccacc

SEQ ID NO: 201 - RNA, 21 nt, Artificial Sequence
  siRNA sense strand against MASP2
ccaccacugccacaaccaccu

SEQ ID NO: 202 - RNA, 21 nt, Artificial Sequence
  siRNA sense strand against MASP2
accacugccacaaccaccugg

SEQ ID NO: 203 - RNA, 21 nt, Artificial Sequence
  siRNA sense strand against MASP2
ccacugccacaaccaccuggg

SEQ ID NO: 204 - RNA, 21 nt, Artificial Sequence
  siRNA sense strand against MASP2
acugccacaaccaccugggcg

SEQ ID NO: 205 - RNA, 21 nt, Artificial Sequence
  siRNA sense strand against MASP2
gccacaaccaccugggcgguu

SEQ ID NO: 206 - RNA, 21 nt, Artificial Sequence
  siRNA sense strand against MASP2
cacaaccaccugggcgguuuc

SEQ ID NO: 207 - RNA, 21 nt, Artificial Sequence
  siRNA sense strand against MASP2
acaaccaccugggcgguuucu

SEQ ID NO: 208 - RNA, 21 nt, Artificial Sequence
  siRNA sense strand against MASP2
caaccaccugggcgguuucua

SEQ ID NO: 209 - RNA, 21 nt, Artificial Sequence
  siRNA sense strand against MASP2
ccaccugggcgguuucuacug

SEQ ID NO: 210 - RNA, 21 nt, Artificial Sequence
  siRNA sense strand against MASP2
gggcgguuucuacugcuccug

SEQ ID NO: 211 - RNA, 21 nt, Artificial Sequence
  siRNA sense strand against MASP2
ggcgguuucuacugcuccugc

SEQ ID NO: 212 - RNA, 21 nt, Artificial Sequence
  siRNA sense strand against MASP2
gcgguuucuacugcuccugcc

SEQ ID NO: 213 - RNA, 21 nt, Artificial Sequence
  siRNA sense strand against MASP2
cgguuucuacugcuccugccg

SEQ ID NO: 214 - RNA, 21 nt, Artificial Sequence
  siRNA sense strand against MASP2
guuucuacugcuccugccgcg

SEQ ID NO: 215 - RNA, 21 nt, Artificial Sequence
  siRNA sense strand against MASP2
gcuccugccgcgcaggcuacg

SEQ ID NO: 216 - RNA, 21 nt, Artificial Sequence
  siRNA sense strand against MASP2
cugccgcgcaggcuacguccu

SEQ ID NO: 217 - RNA, 21 nt, Artificial Sequence
  siRNA sense strand against MASP2
ggcuacguccugcaccguaac

SEQ ID NO: 218 - RNA, 21 nt, Artificial Sequence
  siRNA sense strand against MASP2
gcuacguccugcaccguaaca

SEQ ID NO: 219 - RNA, 21 nt, Artificial Sequence
  siRNA sense strand against MASP2
cuacguccugcaccguaacaa

SEQ ID NO: 220 - RNA, 21 nt, Artificial Sequence
  siRNA sense strand against MASP2
acguccugcaccguaacaagc

SEQ ID NO: 221 - RNA, 21 nt, Artificial Sequence
  siRNA sense strand against MASP2
cguccugcaccguaacaagcg

SEQ ID NO: 222 - RNA, 21 nt, Artificial Sequence
  siRNA sense strand against MASP2
cugcaccguaacaagcgcacc

SEQ ID NO: 223 - RNA, 21 nt, Artificial Sequence
  siRNA sense strand against MASP2
gcaccguaacaagcgcaccug

SEQ ID NO: 224 - RNA, 21 nt, Artificial Sequence
  siRNA sense strand against MASP2
caccguaacaagcgcaccugc

SEQ ID NO: 225 - RNA, 21 nt, Artificial Sequence
  siRNA sense strand against MASP2
ccguaacaagcgcaccugcuc

SEQ ID NO: 226 - RNA, 21 nt, Artificial Sequence
  siRNA sense strand against MASP2
cguaacaagcgcaccugcuca

SEQ ID NO: 227 - RNA, 21 nt, Artificial Sequence
  siRNA sense strand against MASP2
caagcgcaccugcucagcccu

SEQ ID NO: 228 - RNA, 21 nt, Artificial Sequence
  siRNA sense strand against MASP2
gccaggucuucacccagaggu

SEQ ID NO: 229 - RNA, 21 nt, Artificial Sequence
  siRNA sense strand against MASP2
aggucuucacccagaggucug

SEQ ID NO: 230 - RNA, 21 nt, Artificial Sequence
  siRNA sense strand against MASP2
acccagaggucuggggagcuc

SEQ ID NO: 231 - RNA, 21 nt, Artificial Sequence
  siRNA sense strand against MASP2
cccagaggucuggggagcuca

SEQ ID NO: 232 - RNA, 21 nt, Artificial Sequence
  siRNA sense strand against MASP2
ccagaggucuggggagcucag

SEQ ID NO: 233 - RNA, 21 nt, Artificial Sequence
  siRNA sense strand against MASP2
cagaggucuggggagcucagc

SEQ ID NO: 234 - RNA, 21 nt, Artificial Sequence
  siRNA sense strand against MASP2
agaggucuggggagcucagca

SEQ ID NO: 235 - RNA, 21 nt, Artificial Sequence
  siRNA sense strand against MASP2
ggucuggggagcucagcagcc

SEQ ID NO: 236 - RNA, 21 nt, Artificial Sequence
  siRNA sense strand against MASP2
uggggagcucagcagcccuga

SEQ ID NO: 237 - RNA, 21 nt, Artificial Sequence
  siRNA sense strand against MASP2
ggggagcucagcagcccugaa

SEQ ID NO: 238 - RNA, 21 nt, Artificial Sequence
  siRNA sense strand against MASP2
ggagcucagcagcccugaaua

SEQ ID NO: 239 - RNA, 21 nt, Artificial Sequence
  siRNA sense strand against MASP2
gagcucagcagcccugaauac

SEQ ID NO: 240 - RNA, 21 nt, Artificial Sequence
  siRNA sense strand against MASP2
gcucagcagcccugaauaccc

SEQ ID NO: 241 - RNA, 21 nt, Artificial Sequence
  siRNA sense strand against MASP2
cagcagcccugaauacccacg

SEQ ID NO: 242 - RNA, 21 nt, Artificial Sequence
  siRNA sense strand against MASP2
agcagcccugaauacccacgg

SEQ ID NO: 243 - RNA, 21 nt, Artificial Sequence
  siRNA sense strand against MASP2
gcagcccugaauacccacggc

SEQ ID NO: 244 - RNA, 21 nt, Artificial Sequence
  siRNA sense strand against MASP2
cugaauacccacggccguauc

SEQ ID NO: 245 - RNA, 21 nt, Artificial Sequence
  siRNA sense strand against MASP2
cccacggccguaucccaaacu

SEQ ID NO: 246 - RNA, 21 nt, Artificial Sequence
  siRNA sense strand against MASP2
ccacggccguaucccaaacuc

SEQ ID NO: 247 - RNA, 21 nt, Artificial Sequence
  siRNA sense strand against MASP2
ggccguaucccaaacucucca

SEQ ID NO: 248 - RNA, 21 nt, Artificial Sequence
  siRNA sense strand against MASP2
gccguaucccaaacucuccag

SEQ ID NO: 249 - RNA, 21 nt, Artificial Sequence
  siRNA sense strand against MASP2
cguaucccaaacucuccaguu

SEQ ID NO: 250 - RNA, 21 nt, Artificial Sequence
  siRNA sense strand against MASP2
guaucccaaacucuccaguug

SEQ ID NO: 251 - RNA, 21 nt, Artificial Sequence
  siRNA sense strand against MASP2
uaucccaaacucuccaguugc

SEQ ID NO: 252 - RNA, 21 nt, Artificial Sequence
  siRNA sense strand against MASP2
cccaaacucuccaguugcacu

SEQ ID NO: 253 - RNA, 21 nt, Artificial Sequence
  siRNA sense strand against MASP2
caaacucuccaguugcacuua

SEQ ID NO: 254 - RNA, 21 nt, Artificial Sequence
  siRNA sense strand against MASP2
aaacucuccaguugcacuuac

SEQ ID NO: 255 - RNA, 21 nt, Artificial Sequence
  siRNA sense strand against MASP2
aacucuccaguugcacuuaca

SEQ ID NO: 256 - RNA, 21 nt, Artificial Sequence
  siRNA sense strand against MASP2
acucuccaguugcacuuacag

SEQ ID NO: 257 - RNA, 21 nt, Artificial Sequence
  siRNA sense strand against MASP2
cucuccaguugcacuuacagc

SEQ ID NO: 258 - RNA, 21 nt, Artificial Sequence
  siRNA sense strand against MASP2
uccaguugcacuuacagcauc

SEQ ID NO: 259 - RNA, 21 nt, Artificial Sequence
  siRNA sense strand against MASP2
ccaguugcacuuacagcauca

SEQ ID NO: 260 - RNA, 21 nt, Artificial Sequence
  siRNA sense strand against MASP2
caguugcacuuacagcaucag

SEQ ID NO: 261 - RNA, 21 nt, Artificial Sequence
  siRNA sense strand against MASP2
aguugcacuuacagcaucagc

SEQ ID NO: 262 - RNA, 21 nt, Artificial Sequence
  siRNA sense strand against MASP2
guugcacuuacagcaucagcc

SEQ ID NO: 263 - RNA, 21 nt, Artificial Sequence
  siRNA sense strand against MASP2
cacuuacagcaucagccugga

SEQ ID NO: 264 - RNA, 21 nt, Artificial Sequence
  siRNA sense strand against MASP2
cuuacagcaucagccuggagg

SEQ ID NO: 265 - RNA, 21 nt, Artificial Sequence
  siRNA sense strand against MASP2
gcaucagccuggaggaggggu

SEQ ID NO: 266 - RNA, 21 nt, Artificial Sequence
  siRNA sense strand against MASP2
ucagccuggaggagggguuca

SEQ ID NO: 267 - RNA, 21 nt, Artificial Sequence
  siRNA sense strand against MASP2
ccuggaggagggguucagugu

SEQ ID NO: 268 - RNA, 21 nt, Artificial Sequence
  siRNA sense strand against MASP2
cuggaggagggguucaguguc

SEQ ID NO: 269 - RNA, 21 nt, Artificial Sequence
  siRNA sense strand against MASP2
uggaggagggguucaguguca

SEQ ID NO: 270 - RNA, 21 nt, Artificial Sequence
  siRNA sense strand against MASP2
ggaggagggguucagugucau

SEQ ID NO: 271 - RNA, 21 nt, Artificial Sequence
  siRNA sense strand against MASP2
gaggagggguucagugucauu

SEQ ID NO: 272 - RNA, 21 nt, Artificial Sequence
  siRNA sense strand against MASP2
aggagggguucagugucauuc

SEQ ID NO: 273 - RNA, 21 nt, Artificial Sequence
  siRNA sense strand against MASP2
ggagggguucagugucauucu

SEQ ID NO: 274 - RNA, 21 nt, Artificial Sequence
  siRNA sense strand against MASP2
gagggguucagugucauucug

SEQ ID NO: 275 - RNA, 21 nt, Artificial Sequence
  siRNA sense strand against MASP2
gggguucagugucauucugga

SEQ ID NO: 276 - RNA, 21 nt, Artificial Sequence
  siRNA sense strand against MASP2
gguucagugucauucuggacu

SEQ ID NO: 277 - RNA, 21 nt, Artificial Sequence
  siRNA sense strand against MASP2
guucagugucauucuggacuu

SEQ ID NO: 278 - RNA, 21 nt, Artificial Sequence
  siRNA sense strand against MASP2
ucagugucauucuggacuuug

SEQ ID NO: 279 - RNA, 21 nt, Artificial Sequence
  siRNA sense strand against MASP2
cagugucauucuggacuuugu

SEQ ID NO: 280 - RNA, 21 nt, Artificial Sequence
  siRNA sense strand against MASP2
agugucauucuggacuuugug

SEQ ID NO: 281 - RNA, 21 nt, Artificial Sequence
  siRNA sense strand against MASP2
gugucauucuggacuuugugg

SEQ ID NO: 282 - RNA, 21 nt, Artificial Sequence
  siRNA sense strand against MASP2
gacuuuguggaguccuucgau

SEQ ID NO: 283 - RNA, 21 nt, Artificial Sequence
  siRNA sense strand against MASP2
acuuuguggaguccuucgaug

SEQ ID NO: 284 - RNA, 21 nt, Artificial Sequence
  siRNA sense strand against MASP2
uuguggaguccuucgaugugg

SEQ ID NO: 285 - RNA, 21 nt, Artificial Sequence
  siRNA sense strand against MASP2
uguggaguccuucgaugugga

SEQ ID NO: 286 - RNA, 21 nt, Artificial Sequence
  siRNA sense strand against MASP2
uggaguccuucgauguggaga

SEQ ID NO: 287 - RNA, 21 nt, Artificial Sequence
  siRNA sense strand against MASP2
gaguccuucgauguggagaca

SEQ ID NO: 288 - RNA, 21 nt, Artificial Sequence
  siRNA sense strand against MASP2
aguccuucgauguggagacac

SEQ ID NO: 289 - RNA, 21 nt, Artificial Sequence
  siRNA sense strand against MASP2
guccuucgauguggagacaca

SEQ ID NO: 290 - RNA, 21 nt, Artificial Sequence
  siRNA sense strand against MASP2
ccuucgauguggagacacacc

SEQ ID NO: 291 - RNA, 21 nt, Artificial Sequence
  siRNA sense strand against MASP2
cuucgauguggagacacaccc

SEQ ID NO: 292 - RNA, 21 nt, Artificial Sequence
  siRNA sense strand against MASP2
auguggagacacacccugaaa

SEQ ID NO: 293 - RNA, 21 nt, Artificial Sequence
  siRNA sense strand against MASP2
uguggagacacacccugaaac

SEQ ID NO: 294 - RNA, 21 nt, Artificial Sequence
  siRNA sense strand against MASP2
guggagacacacccugaaacc

SEQ ID NO: 295 - RNA, 21 nt, Artificial Sequence
  siRNA sense strand against MASP2
ggagacacacccugaaacccu

SEQ ID NO: 296 - RNA, 21 nt, Artificial Sequence
  siRNA sense strand against MASP2
agacacacccugaaacccugu

SEQ ID NO: 297 - RNA, 21 nt, Artificial Sequence
  siRNA sense strand against MASP2
acacacccugaaacccugugu

SEQ ID NO: 298 - RNA, 21 nt, Artificial Sequence
  siRNA sense strand against MASP2
cacacccugaaacccuguguc

SEQ ID NO: 299 - RNA, 21 nt, Artificial Sequence
  siRNA sense strand against MASP2
cacccugaaacccuguguccc

SEQ ID NO: 300 - RNA, 21 nt, Artificial Sequence
  siRNA sense strand against MASP2
acccugaaacccugugucccu

SEQ ID NO: 301 - RNA, 21 nt, Artificial Sequence
  siRNA sense strand against MASP2
cccugaaacccugugucccua

SEQ ID NO: 302 - RNA, 21 nt, Artificial Sequence
  siRNA sense strand against MASP2
ccugaaacccugugucccuac

SEQ ID NO: 303 - RNA, 21 nt, Artificial Sequence
  siRNA sense strand against MASP2
cugaaacccugugucccuacg

SEQ ID NO: 304 - RNA, 21 nt, Artificial Sequence
  siRNA sense strand against MASP2
gaaacccugugucccuacgac

SEQ ID NO: 305 - RNA, 21 nt, Artificial Sequence
  siRNA sense strand against MASP2
acccugugucccuacgacuuu

SEQ ID NO: 306 - RNA, 21 nt, Artificial Sequence
  siRNA sense strand against MASP2
cccugugucccuacgacuuuc

SEQ ID NO: 307 - RNA, 21 nt, Artificial Sequence
  siRNA sense strand against MASP2
ccugugucccuacgacuuucu

SEQ ID NO: 308 - RNA, 21 nt, Artificial Sequence
  siRNA sense strand against MASP2
cugugucccuacgacuuucuc

SEQ ID NO: 309 - RNA, 21 nt, Artificial Sequence
  siRNA sense strand against MASP2
ugugucccuacgacuuucuca

SEQ ID NO: 310 - RNA, 21 nt, Artificial Sequence
  siRNA sense strand against MASP2
gugucccuacgacuuucucaa

SEQ ID NO: 311 - RNA, 21 nt, Artificial Sequence
  siRNA sense strand against MASP2
ugucccuacgacuuucucaag

SEQ ID NO: 312 - RNA, 21 nt, Artificial Sequence
  siRNA sense strand against MASP2
gucccuacgacuuucucaaga

SEQ ID NO: 313 - RNA, 21 nt, Artificial Sequence
  siRNA sense strand against MASP2
cccuacgacuuucucaagauu

SEQ ID NO: 314 - RNA, 21 nt, Artificial Sequence
  siRNA sense strand against MASP2
cuacgacuuucucaagauuca

SEQ ID NO: 315 - RNA, 21 nt, Artificial Sequence
  siRNA sense strand against MASP2
acgacuuucucaagauucaaa

SEQ ID NO: 316 - RNA, 21 nt, Artificial Sequence
  siRNA sense strand against MASP2
gacuuucucaagauucaaaca

SEQ ID NO: 317 - RNA, 21 nt, Artificial Sequence
  siRNA sense strand against MASP2
acuuucucaagauucaaacag

SEQ ID NO: 318 - RNA, 21 nt, Artificial Sequence
  siRNA sense strand against MASP2
cuuucucaagauucaaacaga

SEQ ID NO: 319 - RNA, 21 nt, Artificial Sequence
  siRNA sense strand against MASP2
uucucaagauucaaacagaca

SEQ ID NO: 320 - RNA, 21 nt, Artificial Sequence
  siRNA sense strand against MASP2
ucucaagauucaaacagacag

SEQ ID NO: 321 - RNA, 21 nt, Artificial Sequence
  siRNA sense strand against MASP2
cucaagauucaaacagacaga

SEQ ID NO: 322 - RNA, 21 nt, Artificial Sequence
  siRNA sense strand against MASP2
ucaagauucaaacagacagag

SEQ ID NO: 323 - RNA, 21 nt, Artificial Sequence
  siRNA sense strand against MASP2
caagauucaaacagacagaga

SEQ ID NO: 324 - RNA, 21 nt, Artificial Sequence
  siRNA sense strand against MASP2
aagauucaaacagacagagaa

SEQ ID NO: 325 - RNA, 21 nt, Artificial Sequence
  siRNA sense strand against MASP2
agauucaaacagacagagaag

SEQ ID NO: 326 - RNA, 21 nt, Artificial Sequence
  siRNA sense strand against MASP2
gauucaaacagacagagaaga

SEQ ID NO: 327 - RNA, 21 nt, Artificial Sequence
  siRNA sense strand against MASP2
caaacagacagagaagaacau

SEQ ID NO: 328 - RNA, 21 nt, Artificial Sequence
  siRNA sense strand against MASP2
aaacagacagagaagaacaug

SEQ ID NO: 329 - RNA, 21 nt, Artificial Sequence
  siRNA sense strand against MASP2
aacagacagagaagaacaugg

SEQ ID NO: 330 - RNA, 21 nt, Artificial Sequence
  siRNA sense strand against MASP2
gacagagaagaacauggccca

SEQ ID NO: 331 - RNA, 21 nt, Artificial Sequence
  siRNA sense strand against MASP2
cagagaagaacauggcccauu

SEQ ID NO: 332 - RNA, 21 nt, Artificial Sequence
  siRNA sense strand against MASP2
agaagaacauggcccauucug

SEQ ID NO: 333 - RNA, 21 nt, Artificial Sequence
  siRNA sense strand against MASP2
ggcccauucugugggaagaca

SEQ ID NO: 334 - RNA, 21 nt, Artificial Sequence
  siRNA sense strand against MASP2
gcccauucugugggaagacau

SEQ ID NO: 335 - RNA, 21 nt, Artificial Sequence
  siRNA sense strand against MASP2
cccauucugugggaagacauu

SEQ ID NO: 336 - RNA, 21 nt, Artificial Sequence
  siRNA sense strand against MASP2
ccauucugugggaagacauug

SEQ ID NO: 337 - RNA, 21 nt, Artificial Sequence
  siRNA sense strand against MASP2
cauucugugggaagacauugc

SEQ ID NO: 338 - RNA, 21 nt, Artificial Sequence
  siRNA sense strand against MASP2
gacauugccccacaggauuga

SEQ ID NO: 339 - RNA, 21 nt, Artificial Sequence
  siRNA sense strand against MASP2
gccccacaggauugaaacaaa

SEQ ID NO: 340 - RNA, 21 nt, Artificial Sequence
  siRNA sense strand against MASP2
cccacaggauugaaacaaaaa

SEQ ID NO: 341 - RNA, 21 nt, Artificial Sequence
  siRNA sense strand against MASP2
ccacaggauugaaacaaaaag

SEQ ID NO: 342 - RNA, 21 nt, Artificial Sequence
  siRNA sense strand against MASP2
cacaggauugaaacaaaaagc

SEQ ID NO: 343 - RNA, 21 nt, Artificial Sequence
  siRNA sense strand against MASP2
acaggauugaaacaaaaagca

SEQ ID NO: 344 - RNA, 21 nt, Artificial Sequence
  siRNA sense strand against MASP2
ggauugaaacaaaaagcaaca

SEQ ID NO: 345 - RNA, 21 nt, Artificial Sequence
  siRNA sense strand against MASP2
gauugaaacaaaaagcaacac

SEQ ID NO: 346 - RNA, 21 nt, Artificial Sequence
  siRNA sense strand against MASP2
auugaaacaaaaagcaacacg

SEQ ID NO: 347 - RNA, 21 nt, Artificial Sequence
  siRNA sense strand against MASP2
gaaacaaaaagcaacacggug

SEQ ID NO: 348 - RNA, 21 nt, Artificial Sequence
  siRNA sense strand against MASP2
aaacaaaaagcaacacgguga

SEQ ID NO: 349 - RNA, 21 nt, Artificial Sequence
  siRNA sense strand against MASP2
acaaaaagcaacacggugacc

SEQ ID NO: 350 - RNA, 21 nt, Artificial Sequence
  siRNA sense strand against MASP2
caaaaagcaacacggugacca

SEQ ID NO: 351 - RNA, 21 nt, Artificial Sequence
  siRNA sense strand against MASP2
aaaagcaacacggugaccauc

SEQ ID NO: 352 - RNA, 21 nt, Artificial Sequence
  siRNA sense strand against MASP2
aaagcaacacggugaccauca

SEQ ID NO: 353 - RNA, 21 nt, Artificial Sequence
  siRNA sense strand against MASP2
aagcaacacggugaccaucac

SEQ ID NO: 354 - RNA, 21 nt, Artificial Sequence
  siRNA sense strand against MASP2
acacggugaccaucaccuuug

SEQ ID NO: 355 - RNA, 21 nt, Artificial Sequence
  siRNA sense strand against MASP2
cacggugaccaucaccuuugu

SEQ ID NO: 356 - RNA, 21 nt, Artificial Sequence
  siRNA sense strand against MASP2
acggugaccaucaccuuuguc

SEQ ID NO: 357 - RNA, 21 nt, Artificial Sequence
  siRNA sense strand against MASP2
cggugaccaucaccuuuguca

SEQ ID NO: 358 - RNA, 21 nt, Artificial Sequence
  siRNA sense strand against MASP2
ggugaccaucaccuuugucac

SEQ ID NO: 359 - RNA, 21 nt, Artificial Sequence
  siRNA sense strand against MASP2
gugaccaucaccuuugucaca

SEQ ID NO: 360 - RNA, 21 nt, Artificial Sequence
  siRNA sense strand against MASP2
gaccaucaccuuugucacaga

SEQ ID NO: 361 - RNA, 21 nt, Artificial Sequence
  siRNA sense strand against MASP2
accaucaccuuugucacagau

SEQ ID NO: 362 - RNA, 21 nt, Artificial Sequence
  siRNA sense strand against MASP2
ccaucaccuuugucacagaug

SEQ ID NO: 363 - RNA, 21 nt, Artificial Sequence
  siRNA sense strand against MASP2
caucaccuuugucacagauga

SEQ ID NO: 364 - RNA, 21 nt, Artificial Sequence
  siRNA sense strand against MASP2
ucaccuuugucacagaugaau

SEQ ID NO: 365 - RNA, 21 nt, Artificial Sequence
  siRNA sense strand against MASP2
accuuugucacagaugaauca

SEQ ID NO: 366 - RNA, 21 nt, Artificial Sequence
  siRNA sense strand against MASP2
ccuuugucacagaugaaucag

SEQ ID NO: 367 - RNA, 21 nt, Artificial Sequence
  siRNA sense strand against MASP2
cuuugucacagaugaaucagg

SEQ ID NO: 368 - RNA, 21 nt, Artificial Sequence
  siRNA sense strand against MASP2
ugucacagaugaaucaggaga

SEQ ID NO: 369 - RNA, 21 nt, Artificial Sequence
  siRNA sense strand against MASP2
ucacagaugaaucaggagacc

SEQ ID NO: 370 - RNA, 21 nt, Artificial Sequence
  siRNA sense strand against MASP2
acagaugaaucaggagaccac

SEQ ID NO: 371 - RNA, 21 nt, Artificial Sequence
  siRNA sense strand against MASP2
cagaugaaucaggagaccaca

SEQ ID NO: 372 - RNA, 21 nt, Artificial Sequence
  siRNA sense strand against MASP2
agaugaaucaggagaccacac

SEQ ID NO: 373 - RNA, 21 nt, Artificial Sequence
  siRNA sense strand against MASP2
caggagaccacacaggcugga

SEQ ID NO: 374 - RNA, 21 nt, Artificial Sequence
  siRNA sense strand against MASP2
gagaccacacaggcuggaaga

SEQ ID NO: 375 - RNA, 21 nt, Artificial Sequence
  siRNA sense strand against MASP2
agaccacacaggcuggaagau

SEQ ID NO: 376 - RNA, 21 nt, Artificial Sequence
  siRNA sense strand against MASP2
gaccacacaggcuggaagauc

SEQ ID NO: 377 - RNA, 21 nt, Artificial Sequence
  siRNA sense strand against MASP2
accacacaggcuggaagaucc

SEQ ID NO: 378 - RNA, 21 nt, Artificial Sequence
  siRNA sense strand against MASP2
cacacaggcuggaagauccac

SEQ ID NO: 379 - RNA, 21 nt, Artificial Sequence
  siRNA sense strand against MASP2
acaggcuggaagauccacuac

SEQ ID NO: 380 - RNA, 21 nt, Artificial Sequence
  siRNA sense strand against MASP2
caggcuggaagauccacuaca

SEQ ID NO: 381 - RNA, 21 nt, Artificial Sequence
  siRNA sense strand against MASP2
aggcuggaagauccacuacac

SEQ ID NO: 382 - RNA, 21 nt, Artificial Sequence
  siRNA sense strand against MASP2
ggcuggaagauccacuacacg

SEQ ID NO: 383 - RNA, 21 nt, Artificial Sequence
  siRNA sense strand against MASP2
gcuggaagauccacuacacga

SEQ ID NO: 384 - RNA, 21 nt, Artificial Sequence
  siRNA sense strand against MASP2
cuggaagauccacuacacgag

SEQ ID NO: 385 - RNA, 21 nt, Artificial Sequence
  siRNA sense strand against MASP2
uggaagauccacuacacgagc

SEQ ID NO: 386 - RNA, 21 nt, Artificial Sequence
  siRNA sense strand against MASP2
ggaagauccacuacacgagca

SEQ ID NO: 387 - RNA, 21 nt, Artificial Sequence
  siRNA sense strand against MASP2
agauccacuacacgagcacag

SEQ ID NO: 388 - RNA, 21 nt, Artificial Sequence
  siRNA sense strand against MASP2
gauccacuacacgagcacagc

SEQ ID NO: 389 - RNA, 21 nt, Artificial Sequence
  siRNA sense strand against MASP2
ccacuacacgagcacagcgca

SEQ ID NO: 390 - RNA, 21 nt, Artificial Sequence
  siRNA sense strand against MASP2
acuacacgagcacagcgcagc

SEQ ID NO: 391 - RNA, 21 nt, Artificial Sequence
  siRNA sense strand against MASP2
cuacacgagcacagcgcagcc

SEQ ID NO: 392 - RNA, 21 nt, Artificial Sequence
  siRNA sense strand against MASP2
acagcgcagccuugcccuuau

SEQ ID NO: 393 - RNA, 21 nt, Artificial Sequence
  siRNA sense strand against MASP2
cagcgcagccuugcccuuauc

SEQ ID NO: 394 - RNA, 21 nt, Artificial Sequence
  siRNA sense strand against MASP2
agcgcagccuugcccuuaucc

SEQ ID NO: 395 - RNA, 21 nt, Artificial Sequence
  siRNA sense strand against MASP2
gcgcagccuugcccuuauccg

SEQ ID NO: 396 - RNA, 21 nt, Artificial Sequence
  siRNA sense strand against MASP2
cagccuugcccuuauccgaug

SEQ ID NO: 397 - RNA, 21 nt, Artificial Sequence
  siRNA sense strand against MASP2
agccuugcccuuauccgaugg

SEQ ID NO: 398 - RNA, 21 nt, Artificial Sequence
  siRNA sense strand against MASP2
gccuugcccuuauccgauggc

SEQ ID NO: 399 - RNA, 21 nt, Artificial Sequence
  siRNA sense strand against MASP2
gcccuuauccgauggcgccac

SEQ ID NO: 400 - RNA, 21 nt, Artificial Sequence
  siRNA sense strand against MASP2
auccgauggcgccaccuaaug

SEQ ID NO: 401 - RNA, 21 nt, Artificial Sequence
  siRNA sense strand against MASP2
uccgauggcgccaccuaaugg

SEQ ID NO: 402 - RNA, 21 nt, Artificial Sequence
  siRNA sense strand against MASP2
cgauggcgccaccuaauggcc

SEQ ID NO: 403 - RNA, 21 nt, Artificial Sequence
  siRNA sense strand against MASP2
uggcgccaccuaauggccacg

SEQ ID NO: 404 - RNA, 21 nt, Artificial Sequence
  siRNA sense strand against MASP2
ggcgccaccuaauggccacgu

SEQ ID NO: 405 - RNA, 21 nt, Artificial Sequence
  siRNA sense strand against MASP2
ccaccuaauggccacguuuca

SEQ ID NO: 406 - RNA, 21 nt, Artificial Sequence
  siRNA sense strand against MASP2
caccuaauggccacguuucac

SEQ ID NO: 407 - RNA, 21 nt, Artificial Sequence
  siRNA sense strand against MASP2
accuaauggccacguuucacc

SEQ ID NO: 408 - RNA, 21 nt, Artificial Sequence
  siRNA sense strand against MASP2
uaauggccacguuucaccugu

SEQ ID NO: 409 - RNA, 21 nt, Artificial Sequence
  siRNA sense strand against MASP2
auggccacguuucaccugugc

SEQ ID NO: 410 - RNA, 21 nt, Artificial Sequence
  siRNA sense strand against MASP2
uggccacguuucaccugugca

SEQ ID NO: 411 - RNA, 21 nt, Artificial Sequence
  siRNA sense strand against MASP2
ggccacguuucaccugugcaa

SEQ ID NO: 412 - RNA, 21 nt, Artificial Sequence
  siRNA sense strand against MASP2
cacguuucaccugugcaagcc

SEQ ID NO: 413 - RNA, 21 nt, Artificial Sequence
  siRNA sense strand against MASP2
acguuucaccugugcaagcca

SEQ ID NO: 414 - RNA, 21 nt, Artificial Sequence
  siRNA sense strand against MASP2
cguuucaccugugcaagccaa

SEQ ID NO: 415 - RNA, 21 nt, Artificial Sequence
  siRNA sense strand against MASP2
uuucaccugugcaagccaaau

SEQ ID NO: 416 - RNA, 21 nt, Artificial Sequence
  siRNA sense strand against MASP2
uucaccugugcaagccaaaua

SEQ ID NO: 417 - RNA, 21 nt, Artificial Sequence
  siRNA sense strand against MASP2
caccugugcaagccaaauaca

SEQ ID NO: 418 - RNA, 21 nt, Artificial Sequence
  siRNA sense strand against MASP2
accugugcaagccaaauacau

SEQ ID NO: 419 - RNA, 21 nt, Artificial Sequence
  siRNA sense strand against MASP2
ccugugcaagccaaauacauc

SEQ ID NO: 420 - RNA, 21 nt, Artificial Sequence
  siRNA sense strand against MASP2
cugugcaagccaaauacaucc

SEQ ID NO: 421 - RNA, 21 nt, Artificial Sequence
  siRNA sense strand against MASP2
ugugcaagccaaauacauccu

SEQ ID NO: 422 - RNA, 21 nt, Artificial Sequence
  siRNA sense strand against MASP2
gugcaagccaaauacauccug

SEQ ID NO: 423 - RNA, 21 nt, Artificial Sequence
  siRNA sense strand against MASP2
caagccaaauacauccugaaa

SEQ ID NO: 424 - RNA, 21 nt, Artificial Sequence
  siRNA sense strand against MASP2
aagccaaauacauccugaaag

SEQ ID NO: 425 - RNA, 21 nt, Artificial Sequence
  siRNA sense strand against MASP2
agccaaauacauccugaaaga

SEQ ID NO: 426 - RNA, 21 nt, Artificial Sequence
  siRNA sense strand against MASP2
gccaaauacauccugaaagac

SEQ ID NO: 427 - RNA, 21 nt, Artificial Sequence
  siRNA sense strand against MASP2
ccaaauacauccugaaagaca

SEQ ID NO: 428 - RNA, 21 nt, Artificial Sequence
  siRNA sense strand against MASP2
caaauacauccugaaagacag

SEQ ID NO: 429 - RNA, 21 nt, Artificial Sequence
  siRNA sense strand against MASP2
aaauacauccugaaagacagc

SEQ ID NO: 430 - RNA, 21 nt, Artificial Sequence
  siRNA sense strand against MASP2
cauccugaaagacagcuucuc

SEQ ID NO: 431 - RNA, 21 nt, Artificial Sequence
  siRNA sense strand against MASP2
uccugaaagacagcuucucca

SEQ ID NO: 432 - RNA, 21 nt, Artificial Sequence
  siRNA sense strand against MASP2
cugaaagacagcuucuccauc

SEQ ID NO: 433 - RNA, 21 nt, Artificial Sequence
  siRNA sense strand against MASP2
ugaaagacagcuucuccaucu

SEQ ID NO: 434 - RNA, 21 nt, Artificial Sequence
  siRNA sense strand against MASP2
gaaagacagcuucuccaucuu

SEQ ID NO: 435 - RNA, 21 nt, Artificial Sequence
  siRNA sense strand against MASP2
agacagcuucuccaucuuuug

SEQ ID NO: 436 - RNA, 21 nt, Artificial Sequence
  siRNA sense strand against MASP2
gacagcuucuccaucuuuugc

SEQ ID NO: 437 - RNA, 21 nt, Artificial Sequence
  siRNA sense strand against MASP2
gcuucuccaucuuuugcgaga

SEQ ID NO: 438 - RNA, 21 nt, Artificial Sequence
  siRNA sense strand against MASP2
cuccaucuuuugcgagacugg

SEQ ID NO: 439 - RNA, 21 nt, Artificial Sequence
  siRNA sense strand against MASP2
ccaucuuuugcgagacuggcu

SEQ ID NO: 440 - RNA, 21 nt, Artificial Sequence
  siRNA sense strand against MASP2
caucuuuugcgagacuggcua

SEQ ID NO: 441 - RNA, 21 nt, Artificial Sequence
  siRNA sense strand against MASP2
aucuuuugcgagacuggcuau

SEQ ID NO: 442 - RNA, 21 nt, Artificial Sequence
  siRNA sense strand against MASP2
gcgagacuggcuaugagcuuc

SEQ ID NO: 443 - RNA, 21 nt, Artificial Sequence
  siRNA sense strand against MASP2
cgagacuggcuaugagcuucu

SEQ ID NO: 444 - RNA, 21 nt, Artificial Sequence
  siRNA sense strand against MASP2
agacuggcuaugagcuucugc

SEQ ID NO: 445 - RNA, 21 nt, Artificial Sequence
  siRNA sense strand against MASP2
cuggcuaugagcuucugcaag

SEQ ID NO: 446 - RNA, 21 nt, Artificial Sequence
  siRNA sense strand against MASP2
ggcuaugagcuucugcaaggu

SEQ ID NO: 447 - RNA, 21 nt, Artificial Sequence
  siRNA sense strand against MASP2
gcuaugagcuucugcaagguc

SEQ ID NO: 448 - RNA, 21 nt, Artificial Sequence
  siRNA sense strand against MASP2
gagcuucugcaaggucacuug

SEQ ID NO: 449 - RNA, 21 nt, Artificial Sequence
  siRNA sense strand against MASP2
agcuucugcaaggucacuugc

SEQ ID NO: 450 - RNA, 21 nt, Artificial Sequence
  siRNA sense strand against MASP2
gcaaggucacuugccccugaa

SEQ ID NO: 451 - RNA, 21 nt, Artificial Sequence
  siRNA sense strand against MASP2
caaggucacuugccccugaaa

SEQ ID NO: 452 - RNA, 21 nt, Artificial Sequence
  siRNA sense strand against MASP2
aaggucacuugccccugaaau

SEQ ID NO: 453 - RNA, 21 nt, Artificial Sequence
  siRNA sense strand against MASP2
aggucacuugccccugaaauc

SEQ ID NO: 454 - RNA, 21 nt, Artificial Sequence
  siRNA sense strand against MASP2
ggucacuugccccugaaaucc

SEQ ID NO: 455 - RNA, 21 nt, Artificial Sequence
  siRNA sense strand against MASP2
gucacuugccccugaaauccu

SEQ ID NO: 456 - RNA, 21 nt, Artificial Sequence
  siRNA sense strand against MASP2
cuugccccugaaauccuuuac

SEQ ID NO: 457 - RNA, 21 nt, Artificial Sequence
  siRNA sense strand against MASP2
uugccccugaaauccuuuacu

SEQ ID NO: 458 - RNA, 21 nt, Artificial Sequence
  siRNA sense strand against MASP2
ugccccugaaauccuuuacug

SEQ ID NO: 459 - RNA, 21 nt, Artificial Sequence
  siRNA sense strand against MASP2
gccccugaaauccuuuacugc

SEQ ID NO: 460 - RNA, 21 nt, Artificial Sequence
  siRNA sense strand against MASP2
ccccugaaauccuuuacugca

SEQ ID NO: 461 - RNA, 21 nt, Artificial Sequence
  siRNA sense strand against MASP2
cccugaaauccuuuacugcag

SEQ ID NO: 462 - RNA, 21 nt, Artificial Sequence
  siRNA sense strand against MASP2
ccugaaauccuuuacugcagu

SEQ ID NO: 463 - RNA, 21 nt, Artificial Sequence
  siRNA sense strand against MASP2
gaaauccuuuacugcaguuug

SEQ ID NO: 464 - RNA, 21 nt, Artificial Sequence
  siRNA sense strand against MASP2
aaauccuuuacugcaguuugu

SEQ ID NO: 465 - RNA, 21 nt, Artificial Sequence
  siRNA sense strand against MASP2
auccuuuacugcaguuuguca

SEQ ID NO: 466 - RNA, 21 nt, Artificial Sequence
  siRNA sense strand against MASP2
uccuuuacugcaguuugucag

SEQ ID NO: 467 - RNA, 21 nt, Artificial Sequence
  siRNA sense strand against MASP2
ccuuuacugcaguuugucaga

SEQ ID NO: 468 - RNA, 21 nt, Artificial Sequence
  siRNA sense strand against MASP2
cuuuacugcaguuugucagaa

SEQ ID NO: 469 - RNA, 21 nt, Artificial Sequence
  siRNA sense strand against MASP2
uacugcaguuugucagaaaga

SEQ ID NO: 470 - RNA, 21 nt, Artificial Sequence
  siRNA sense strand against MASP2
acugcaguuugucagaaagau

SEQ ID NO: 471 - RNA, 21 nt, Artificial Sequence
  siRNA sense strand against MASP2
cugcaguuugucagaaagaug

SEQ ID NO: 472 - RNA, 21 nt, Artificial Sequence
  siRNA sense strand against MASP2
ugcaguuugucagaaagaugg

SEQ ID NO: 473 - RNA, 21 nt, Artificial Sequence
  siRNA sense strand against MASP2
caguuugucagaaagauggau

SEQ ID NO: 474 - RNA, 21 nt, Artificial Sequence
  siRNA sense strand against MASP2
guuugucagaaagauggaucu

SEQ ID NO: 475 - RNA, 21 nt, Artificial Sequence
  siRNA sense strand against MASP2
uugucagaaagauggaucuug

SEQ ID NO: 476 - RNA, 21 nt, Artificial Sequence
  siRNA sense strand against MASP2
cagaaagauggaucuugggac

SEQ ID NO: 477 - RNA, 21 nt, Artificial Sequence
  siRNA sense strand against MASP2
agaaagauggaucuugggacc

SEQ ID NO: 478 - RNA, 21 nt, Artificial Sequence
  siRNA sense strand against MASP2
gaaagauggaucuugggaccg

SEQ ID NO: 479 - RNA, 21 nt, Artificial Sequence
  siRNA sense strand against MASP2
agauggaucuugggaccggcc

SEQ ID NO: 480 - RNA, 21 nt, Artificial Sequence
  siRNA sense strand against MASP2
gauggaucuugggaccggcca

SEQ ID NO: 481 - RNA, 21 nt, Artificial Sequence
  siRNA sense strand against MASP2
ccaaugcccgcgugcagcauu

SEQ ID NO: 482 - RNA, 21 nt, Artificial Sequence
  siRNA sense strand against MASP2
caaugcccgcgugcagcauug

SEQ ID NO: 483 - RNA, 21 nt, Artificial Sequence
  siRNA sense strand against MASP2
aaugcccgcgugcagcauugu

SEQ ID NO: 484 - RNA, 21 nt, Artificial Sequence
  siRNA sense strand against MASP2
cccgcgugcagcauuguugac

SEQ ID NO: 485 - RNA, 21 nt, Artificial Sequence
  siRNA sense strand against MASP2
ccgcgugcagcauuguugacu

SEQ ID NO: 486 - RNA, 21 nt, Artificial Sequence
  siRNA sense strand against MASP2
cgugcagcauuguugacugug

SEQ ID NO: 487 - RNA, 21 nt, Artificial Sequence
  siRNA sense strand against MASP2
gugcagcauuguugacugugg

SEQ ID NO: 488 - RNA, 21 nt, Artificial Sequence
  siRNA sense strand against MASP2
gcagcauuguugacuguggcc

SEQ ID NO: 489 - RNA, 21 nt, Artificial Sequence
  siRNA sense strand against MASP2
gcauuguugacuguggcccuc

SEQ ID NO: 490 - RNA, 21 nt, Artificial Sequence
  siRNA sense strand against MASP2
cauuguugacuguggcccucc

SEQ ID NO: 491 - RNA, 21 nt, Artificial Sequence
  siRNA sense strand against MASP2
auuguugacuguggcccuccu

SEQ ID NO: 492 - RNA, 21 nt, Artificial Sequence
  siRNA sense strand against MASP2
ugacuguggcccuccugauga

SEQ ID NO: 493 - RNA, 21 nt, Artificial Sequence
  siRNA sense strand against MASP2
gacuguggcccuccugaugau

SEQ ID NO: 494 - RNA, 21 nt, Artificial Sequence
  siRNA sense strand against MASP2
acuguggcccuccugaugauc

SEQ ID NO: 495 - RNA, 21 nt, Artificial Sequence
  siRNA sense strand against MASP2
cuguggcccuccugaugaucu

SEQ ID NO: 496 - RNA, 21 nt, Artificial Sequence
  siRNA sense strand against MASP2
uggcccuccugaugaucuacc

SEQ ID NO: 497 - RNA, 21 nt, Artificial Sequence
  siRNA sense strand against MASP2
gcccuccugaugaucuaccca

SEQ ID NO: 498 - RNA, 21 nt, Artificial Sequence
  siRNA sense strand against MASP2
ccuccugaugaucuacccagu

SEQ ID NO: 499 - RNA, 21 nt, Artificial Sequence
  siRNA sense strand against MASP2
uccugaugaucuacccagugg

SEQ ID NO: 500 - RNA, 21 nt, Artificial Sequence
  siRNA sense strand against MASP2
ccugaugaucuacccaguggc

SEQ ID NO: 501 - RNA, 21 nt, Artificial Sequence
  siRNA sense strand against MASP2
cugaugaucuacccaguggcc

SEQ ID NO: 502 - RNA, 21 nt, Artificial Sequence
  siRNA sense strand against MASP2
uacccaguggccgaguggagu

SEQ ID NO: 503 - RNA, 21 nt, Artificial Sequence
  siRNA sense strand against MASP2
acccaguggccgaguggagua

SEQ ID NO: 504 - RNA, 21 nt, Artificial Sequence
  siRNA sense strand against MASP2
cccaguggccgaguggaguac

SEQ ID NO: 505 - RNA, 21 nt, Artificial Sequence
  siRNA sense strand against MASP2
ccaguggccgaguggaguaca

SEQ ID NO: 506 - RNA, 21 nt, Artificial Sequence
  siRNA sense strand against MASP2
guggccgaguggaguacauca

SEQ ID NO: 507 - RNA, 21 nt, Artificial Sequence
  siRNA sense strand against MASP2
ggccgaguggaguacaucaca

SEQ ID NO: 508 - RNA, 21 nt, Artificial Sequence
  siRNA sense strand against MASP2
gccgaguggaguacaucacag

SEQ ID NO: 509 - RNA, 21 nt, Artificial Sequence
  siRNA sense strand against MASP2
ccgaguggaguacaucacagg

SEQ ID NO: 510 - RNA, 21 nt, Artificial Sequence
  siRNA sense strand against MASP2
cgaguggaguacaucacaggu

SEQ ID NO: 511 - RNA, 21 nt, Artificial Sequence
  siRNA sense strand against MASP2
gaguggaguacaucacagguc

SEQ ID NO: 512 - RNA, 21 nt, Artificial Sequence
  siRNA sense strand against MASP2
aguggaguacaucacaggucc

SEQ ID NO: 513 - RNA, 21 nt, Artificial Sequence
  siRNA sense strand against MASP2
guggaguacaucacagguccu

SEQ ID NO: 514 - RNA, 21 nt, Artificial Sequence
  siRNA sense strand against MASP2
ggaguacaucacagguccugg

SEQ ID NO: 515 - RNA, 21 nt, Artificial Sequence
  siRNA sense strand against MASP2
gaguacaucacagguccugga

SEQ ID NO: 516 - RNA, 21 nt, Artificial Sequence
  siRNA sense strand against MASP2
guacaucacagguccuggagu

SEQ ID NO: 517 - RNA, 21 nt, Artificial Sequence
  siRNA sense strand against MASP2
cacagguccuggagugaccac

SEQ ID NO: 518 - RNA, 21 nt, Artificial Sequence
  siRNA sense strand against MASP2
acagguccuggagugaccacc

SEQ ID NO: 519 - RNA, 21 nt, Artificial Sequence
  siRNA sense strand against MASP2
ccuggagugaccaccuacaaa

SEQ ID NO: 520 - RNA, 21 nt, Artificial Sequence
  siRNA sense strand against MASP2
uggagugaccaccuacaaagc

SEQ ID NO: 521 - RNA, 21 nt, Artificial Sequence
  siRNA sense strand against MASP2
ggagugaccaccuacaaagcu

SEQ ID NO: 522 - RNA, 21 nt, Artificial Sequence
  siRNA sense strand against MASP2
gagugaccaccuacaaagcug

SEQ ID NO: 523 - RNA, 21 nt, Artificial Sequence
  siRNA sense strand against MASP2
agugaccaccuacaaagcugu

SEQ ID NO: 524 - RNA, 21 nt, Artificial Sequence
  siRNA sense strand against MASP2
ugaccaccuacaaagcuguga

SEQ ID NO: 525 - RNA, 21 nt, Artificial Sequence
  siRNA sense strand against MASP2
caccuacaaagcugugauuca

SEQ ID NO: 526 - RNA, 21 nt, Artificial Sequence
  siRNA sense strand against MASP2
ccuacaaagcugugauucagu

SEQ ID NO: 527 - RNA, 21 nt, Artificial Sequence
  siRNA sense strand against MASP2
cuacaaagcugugauucagua

SEQ ID NO: 528 - RNA, 21 nt, Artificial Sequence
  siRNA sense strand against MASP2
acaaagcugugauucaguaca

SEQ ID NO: 529 - RNA, 21 nt, Artificial Sequence
  siRNA sense strand against MASP2
caaagcugugauucaguacag

SEQ ID NO: 530 - RNA, 21 nt, Artificial Sequence
  siRNA sense strand against MASP2
aaagcugugauucaguacagc

SEQ ID NO: 531 - RNA, 21 nt, Artificial Sequence
  siRNA sense strand against MASP2
agcugugauucaguacagcug

SEQ ID NO: 532 - RNA, 21 nt, Artificial Sequence
  siRNA sense strand against MASP2
gauucaguacagcugugaaga

SEQ ID NO: 533 - RNA, 21 nt, Artificial Sequence
  siRNA sense strand against MASP2
uucaguacagcugugaagaga

SEQ ID NO: 534 - RNA, 21 nt, Artificial Sequence
  siRNA sense strand against MASP2
ucaguacagcugugaagagac

SEQ ID NO: 535 - RNA, 21 nt, Artificial Sequence
  siRNA sense strand against MASP2
caguacagcugugaagagacc

SEQ ID NO: 536 - RNA, 21 nt, Artificial Sequence
  siRNA sense strand against MASP2
guacagcugugaagagaccuu

SEQ ID NO: 537 - RNA, 21 nt, Artificial Sequence
  siRNA sense strand against MASP2
acagcugugaagagaccuucu

SEQ ID NO: 538 - RNA, 21 nt, Artificial Sequence
  siRNA sense strand against MASP2
cagcugugaagagaccuucua

SEQ ID NO: 539 - RNA, 21 nt, Artificial Sequence
  siRNA sense strand against MASP2
agcugugaagagaccuucuac

SEQ ID NO: 540 - RNA, 21 nt, Artificial Sequence
  siRNA sense strand against MASP2
ugugaagagaccuucuacaca

SEQ ID NO: 541 - RNA, 21 nt, Artificial Sequence
  siRNA sense strand against MASP2
gugaagagaccuucuacacaa

SEQ ID NO: 542 - RNA, 21 nt, Artificial Sequence
  siRNA sense strand against MASP2
ugaagagaccuucuacacaau

SEQ ID NO: 543 - RNA, 21 nt, Artificial Sequence
  siRNA sense strand against MASP2
gaagagaccuucuacacaaug

SEQ ID NO: 544 - RNA, 21 nt, Artificial Sequence
  siRNA sense strand against MASP2
aagagaccuucuacacaauga

SEQ ID NO: 545 - RNA, 21 nt, Artificial Sequence
  siRNA sense strand against MASP2
agagaccuucuacacaaugaa

SEQ ID NO: 546 - RNA, 21 nt, Artificial Sequence
  siRNA sense strand against MASP2
gagaccuucuacacaaugaaa

SEQ ID NO: 547 - RNA, 21 nt, Artificial Sequence
  siRNA sense strand against MASP2
agaccuucuacacaaugaaag

SEQ ID NO: 548 - RNA, 21 nt, Artificial Sequence
  siRNA sense strand against MASP2
gaccuucuacacaaugaaagu

SEQ ID NO: 549 - RNA, 21 nt, Artificial Sequence
  siRNA sense strand against MASP2
accuucuacacaaugaaagug

SEQ ID NO: 550 - RNA, 21 nt, Artificial Sequence
  siRNA sense strand against MASP2
ccuucuacacaaugaaaguga

SEQ ID NO: 551 - RNA, 21 nt, Artificial Sequence
  siRNA sense strand against MASP2
cuucuacacaaugaaagugaa

SEQ ID NO: 552 - RNA, 21 nt, Artificial Sequence
  siRNA sense strand against MASP2
uucuacacaaugaaagugaau

SEQ ID NO: 553 - RNA, 21 nt, Artificial Sequence
  siRNA sense strand against MASP2
ucuacacaaugaaagugaaug

SEQ ID NO: 554 - RNA, 21 nt, Artificial Sequence
  siRNA sense strand against MASP2
cuacacaaugaaagugaauga

SEQ ID NO: 555 - RNA, 21 nt, Artificial Sequence
  siRNA sense strand against MASP2
acacaaugaaagugaaugaug

SEQ ID NO: 556 - RNA, 21 nt, Artificial Sequence
  siRNA sense strand against MASP2
cacaaugaaagugaaugaugg

SEQ ID NO: 557 - RNA, 21 nt, Artificial Sequence
  siRNA sense strand against MASP2
caaugaaagugaaugauggua

SEQ ID NO: 558 - RNA, 21 nt, Artificial Sequence
  siRNA sense strand against MASP2
aaugaaagugaaugaugguaa

SEQ ID NO: 559 - RNA, 21 nt, Artificial Sequence
  siRNA sense strand against MASP2
augaaagugaaugaugguaaa

SEQ ID NO: 560 - RNA, 21 nt, Artificial Sequence
  siRNA sense strand against MASP2
gaaagugaaugaugguaaaua

SEQ ID NO: 561 - RNA, 21 nt, Artificial Sequence
  siRNA sense strand against MASP2
aagugaaugaugguaaauaug

SEQ ID NO: 562 - RNA, 21 nt, Artificial Sequence
  siRNA sense strand against MASP2
agugaaugaugguaaauaugu

SEQ ID NO: 563 - RNA, 21 nt, Artificial Sequence
  siRNA sense strand against MASP2
gugaaugaugguaaauaugug

SEQ ID NO: 564 - RNA, 21 nt, Artificial Sequence
  siRNA sense strand against MASP2
ugaaugaugguaaauaugugu

SEQ ID NO: 565 - RNA, 21 nt, Artificial Sequence
  siRNA sense strand against MASP2
gaaugaugguaaauaugugug

SEQ ID NO: 566 - RNA, 21 nt, Artificial Sequence
  siRNA sense strand against MASP2
gguaaauaugugugugaggcu

SEQ ID NO: 567 - RNA, 21 nt, Artificial Sequence
  siRNA sense strand against MASP2
auaugugugugaggcugaugg

SEQ ID NO: 568 - RNA, 21 nt, Artificial Sequence
  siRNA sense strand against MASP2
ugugugugaggcugauggauu

SEQ ID NO: 569 - RNA, 21 nt, Artificial Sequence
  siRNA sense strand against MASP2
gugugugaggcugauggauuc

SEQ ID NO: 570 - RNA, 21 nt, Artificial Sequence
  siRNA sense strand against MASP2
ugugugaggcugauggauucu

SEQ ID NO: 571 - RNA, 21 nt, Artificial Sequence
  siRNA sense strand against MASP2
gugugaggcugauggauucug

SEQ ID NO: 572 - RNA, 21 nt, Artificial Sequence
  siRNA sense strand against MASP2
ugugaggcugauggauucugg

SEQ ID NO: 573 - RNA, 21 nt, Artificial Sequence
  siRNA sense strand against MASP2
gugaggcugauggauucugga

SEQ ID NO: 574 - RNA, 21 nt, Artificial Sequence
  siRNA sense strand against MASP2
gaggcugauggauucuggacg

SEQ ID NO: 575 - RNA, 21 nt, Artificial Sequence
  siRNA sense strand against MASP2
ggcugauggauucuggacgag

SEQ ID NO: 576 - RNA, 21 nt, Artificial Sequence
  siRNA sense strand against MASP2
gcugauggauucuggacgagc

SEQ ID NO: 577 - RNA, 21 nt, Artificial Sequence
  siRNA sense strand against MASP2
gauggauucuggacgagcucc

SEQ ID NO: 578 - RNA, 21 nt, Artificial Sequence
  siRNA sense strand against MASP2
gauucuggacgagcuccaaag

SEQ ID NO: 579 - RNA, 21 nt, Artificial Sequence
  siRNA sense strand against MASP2
auucuggacgagcuccaaagg

SEQ ID NO: 580 - RNA, 21 nt, Artificial Sequence
  siRNA sense strand against MASP2
cuggacgagcuccaaaggaga

SEQ ID NO: 581 - RNA, 21 nt, Artificial Sequence
  siRNA sense strand against MASP2
uggacgagcuccaaaggagaa

SEQ ID NO: 582 - RNA, 21 nt, Artificial Sequence
  siRNA sense strand against MASP2
ggacgagcuccaaaggagaaa

SEQ ID NO: 583 - RNA, 21 nt, Artificial Sequence
  siRNA sense strand against MASP2
gacgagcuccaaaggagaaaa

SEQ ID NO: 584 - RNA, 21 nt, Artificial Sequence
  siRNA sense strand against MASP2
cgagcuccaaaggagaaaaau

SEQ ID NO: 585 - RNA, 21 nt, Artificial Sequence
  siRNA sense strand against MASP2
gagcuccaaaggagaaaaauc

SEQ ID NO: 586 - RNA, 21 nt, Artificial Sequence
  siRNA sense strand against MASP2
agcuccaaaggagaaaaauca

SEQ ID NO: 587 - RNA, 21 nt, Artificial Sequence
  siRNA sense strand against MASP2
gcuccaaaggagaaaaaucac

SEQ ID NO: 588 - RNA, 21 nt, Artificial Sequence
  siRNA sense strand against MASP2
cuccaaaggagaaaaaucacu

SEQ ID NO: 589 - RNA, 21 nt, Artificial Sequence
  siRNA sense strand against MASP2
ccaaaggagaaaaaucacucc

SEQ ID NO: 590 - RNA, 21 nt, Artificial Sequence
  siRNA sense strand against MASP2
aggagaaaaaucacucccagu

SEQ ID NO: 591 - RNA, 21 nt, Artificial Sequence
  siRNA sense strand against MASP2
ggagaaaaaucacucccaguc

SEQ ID NO: 592 - RNA, 21 nt, Artificial Sequence
  siRNA sense strand against MASP2
agaaaaaucacucccagucug

SEQ ID NO: 593 - RNA, 21 nt, Artificial Sequence
  siRNA sense strand against MASP2
gaaaaaucacucccagucugu

SEQ ID NO: 594 - RNA, 21 nt, Artificial Sequence
  siRNA sense strand against MASP2
aaaaaucacucccagucugug

SEQ ID NO: 595 - RNA, 21 nt, Artificial Sequence
  siRNA sense strand against MASP2
aaaaucacucccagucuguga

SEQ ID NO: 596 - RNA, 21 nt, Artificial Sequence
  siRNA sense strand against MASP2
cucccagucugugagccuguu

SEQ ID NO: 597 - RNA, 21 nt, Artificial Sequence
  siRNA sense strand against MASP2
ucccagucugugagccuguuu

SEQ ID NO: 598 - RNA, 21 nt, Artificial Sequence
  siRNA sense strand against MASP2
cccagucugugagccuguuug

SEQ ID NO: 599 - RNA, 21 nt, Artificial Sequence
  siRNA sense strand against MASP2
cagucugugagccuguuugug

SEQ ID NO: 600 - RNA, 21 nt, Artificial Sequence
  siRNA sense strand against MASP2
cugugagccuguuuguggacu

SEQ ID NO: 601 - RNA, 21 nt, Artificial Sequence
  siRNA sense strand against MASP2
ugagccuguuuguggacuauc

SEQ ID NO: 602 - RNA, 21 nt, Artificial Sequence
  siRNA sense strand against MASP2
gccuguuuguggacuaucagc

SEQ ID NO: 603 - RNA, 21 nt, Artificial Sequence
  siRNA sense strand against MASP2
ccuguuuguggacuaucagcc

SEQ ID NO: 604 - RNA, 21 nt, Artificial Sequence
  siRNA sense strand against MASP2
cuguuuguggacuaucagccc

SEQ ID NO: 605 - RNA, 21 nt, Artificial Sequence
  siRNA sense strand against MASP2
uggacuaucagcccgcacaac

SEQ ID NO: 606 - RNA, 21 nt, Artificial Sequence
  siRNA sense strand against MASP2
acuaucagcccgcacaacagg

SEQ ID NO: 607 - RNA, 21 nt, Artificial Sequence
  siRNA sense strand against MASP2
cuaucagcccgcacaacagga

SEQ ID NO: 608 - RNA, 21 nt, Artificial Sequence
  siRNA sense strand against MASP2
ccgcacaacaggagggcguau

SEQ ID NO: 609 - RNA, 21 nt, Artificial Sequence
  siRNA sense strand against MASP2
cgcacaacaggagggcguaua

SEQ ID NO: 610 - RNA, 21 nt, Artificial Sequence
  siRNA sense strand against MASP2
gcacaacaggagggcguauau

SEQ ID NO: 611 - RNA, 21 nt, Artificial Sequence
  siRNA sense strand against MASP2
cacaacaggagggcguauaua

SEQ ID NO: 612 - RNA, 21 nt, Artificial Sequence
  siRNA sense strand against MASP2
acaacaggagggcguauauau

SEQ ID NO: 613 - RNA, 21 nt, Artificial Sequence
  siRNA sense strand against MASP2
caacaggagggcguauauaug

SEQ ID NO: 614 - RNA, 21 nt, Artificial Sequence
  siRNA sense strand against MASP2
aacaggagggcguauauaugg

SEQ ID NO: 615 - RNA, 21 nt, Artificial Sequence
  siRNA sense strand against MASP2
gcguauauauggagggcaaaa

SEQ ID NO: 616 - RNA, 21 nt, Artificial Sequence
  siRNA sense strand against MASP2
cguauauauggagggcaaaag

SEQ ID NO: 617 - RNA, 21 nt, Artificial Sequence
  siRNA sense strand against MASP2
auauggagggcaaaaggcaaa

SEQ ID NO: 618 - RNA, 21 nt, Artificial Sequence
  siRNA sense strand against MASP2
uauggagggcaaaaggcaaaa

SEQ ID NO: 619 - RNA, 21 nt, Artificial Sequence
  siRNA sense strand against MASP2
ggagggcaaaaggcaaaaccu

SEQ ID NO: 620 - RNA, 21 nt, Artificial Sequence
  siRNA sense strand against MASP2
agggcaaaaggcaaaaccugg

SEQ ID NO: 621 - RNA, 21 nt, Artificial Sequence
  siRNA sense strand against MASP2
gggcaaaaggcaaaaccuggu

SEQ ID NO: 622 - RNA, 21 nt, Artificial Sequence
  siRNA sense strand against MASP2
ggcaaaaggcaaaaccuggug

SEQ ID NO: 623 - RNA, 21 nt, Artificial Sequence
  siRNA sense strand against MASP2
gcaaaaggcaaaaccugguga

SEQ ID NO: 624 - RNA, 21 nt, Artificial Sequence
  siRNA sense strand against MASP2
aaaggcaaaaccuggugauuu

SEQ ID NO: 625 - RNA, 21 nt, Artificial Sequence
  siRNA sense strand against MASP2
aaggcaaaaccuggugauuuu

SEQ ID NO: 626 - RNA, 21 nt, Artificial Sequence
  siRNA sense strand against MASP2
aggcaaaaccuggugauuuuc

SEQ ID NO: 627 - RNA, 21 nt, Artificial Sequence
  siRNA sense strand against MASP2
ggcaaaaccuggugauuuucc

SEQ ID NO: 628 - RNA, 21 nt, Artificial Sequence
  siRNA sense strand against MASP2
gcaaaaccuggugauuuuccu

SEQ ID NO: 629 - RNA, 21 nt, Artificial Sequence
  siRNA sense strand against MASP2
aaaaccuggugauuuuccuug

SEQ ID NO: 630 - RNA, 21 nt, Artificial Sequence
  siRNA sense strand against MASP2
aaaccuggugauuuuccuugg

SEQ ID NO: 631 - RNA, 21 nt, Artificial Sequence
  siRNA sense strand against MASP2
accuggugauuuuccuuggca

SEQ ID NO: 632 - RNA, 21 nt, Artificial Sequence
  siRNA sense strand against MASP2
ccuggugauuuuccuuggcaa

SEQ ID NO: 633 - RNA, 21 nt, Artificial Sequence
  siRNA sense strand against MASP2
cuggugauuuuccuuggcaag

SEQ ID NO: 634 - RNA, 21 nt, Artificial Sequence
  siRNA sense strand against MASP2
uggugauuuuccuuggcaagu

SEQ ID NO: 635 - RNA, 21 nt, Artificial Sequence
  siRNA sense strand against MASP2
ggugauuuuccuuggcaaguc

SEQ ID NO: 636 - RNA, 21 nt, Artificial Sequence
  siRNA sense strand against MASP2
gugauuuuccuuggcaagucc

SEQ ID NO: 637 - RNA, 21 nt, Artificial Sequence
  siRNA sense strand against MASP2
ugauuuuccuuggcaaguccu

SEQ ID NO: 638 - RNA, 21 nt, Artificial Sequence
  siRNA sense strand against MASP2
gauuuuccuuggcaaguccug

SEQ ID NO: 639 - RNA, 21 nt, Artificial Sequence
  siRNA sense strand against MASP2
uccuuggcaaguccugauauu

SEQ ID NO: 640 - RNA, 21 nt, Artificial Sequence
  siRNA sense strand against MASP2
ccuuggcaaguccugauauua

SEQ ID NO: 641 - RNA, 21 nt, Artificial Sequence
  siRNA sense strand against MASP2
cuuggcaaguccugauauuag

SEQ ID NO: 642 - RNA, 21 nt, Artificial Sequence
  siRNA sense strand against MASP2
uuggcaaguccugauauuagg

SEQ ID NO: 643 - RNA, 21 nt, Artificial Sequence
  siRNA sense strand against MASP2
ggcaaguccugauauuaggug

SEQ ID NO: 644 - RNA, 21 nt, Artificial Sequence
  siRNA sense strand against MASP2
gcaaguccugauauuaggugg

SEQ ID NO: 645 - RNA, 21 nt, Artificial Sequence
  siRNA sense strand against MASP2
aguccugauauuagguggaac

SEQ ID NO: 646 - RNA, 21 nt, Artificial Sequence
  siRNA sense strand against MASP2
guccugauauuagguggaacc

SEQ ID NO: 647 - RNA, 21 nt, Artificial Sequence
  siRNA sense strand against MASP2
uccugauauuagguggaacca

SEQ ID NO: 648 - RNA, 21 nt, Artificial Sequence
  siRNA sense strand against MASP2
ccugauauuagguggaaccac

SEQ ID NO: 649 - RNA, 21 nt, Artificial Sequence
  siRNA sense strand against MASP2
gauauuagguggaaccacagc

SEQ ID NO: 650 - RNA, 21 nt, Artificial Sequence
  siRNA sense strand against MASP2
auuagguggaaccacagcagc

SEQ ID NO: 651 - RNA, 21 nt, Artificial Sequence
  siRNA sense strand against MASP2
uuagguggaaccacagcagca

SEQ ID NO: 652 - RNA, 21 nt, Artificial Sequence
  siRNA sense strand against MASP2
agguggaaccacagcagcagg

SEQ ID NO: 653 - RNA, 21 nt, Artificial Sequence
  siRNA sense strand against MASP2
gguggaaccacagcagcaggu

SEQ ID NO: 654 - RNA, 21 nt, Artificial Sequence
  siRNA sense strand against MASP2
guggaaccacagcagcaggug

SEQ ID NO: 655 - RNA, 21 nt, Artificial Sequence
  siRNA sense strand against MASP2
gaaccacagcagcaggugcac

SEQ ID NO: 656 - RNA, 21 nt, Artificial Sequence
  siRNA sense strand against MASP2
aaccacagcagcaggugcacu

SEQ ID NO: 657 - RNA, 21 nt, Artificial Sequence
  siRNA sense strand against MASP2
accacagcagcaggugcacuu

SEQ ID NO: 658 - RNA, 21 nt, Artificial Sequence
  siRNA sense strand against MASP2
ccacagcagcaggugcacuuu

SEQ ID NO: 659 - RNA, 21 nt, Artificial Sequence
  siRNA sense strand against MASP2
cacagcagcaggugcacuuuu

SEQ ID NO: 660 - RNA, 21 nt, Artificial Sequence
  siRNA sense strand against MASP2
acagcagcaggugcacuuuua

SEQ ID NO: 661 - RNA, 21 nt, Artificial Sequence
  siRNA sense strand against MASP2
cagcagcaggugcacuuuuau

SEQ ID NO: 662 - RNA, 21 nt, Artificial Sequence
  siRNA sense strand against MASP2
agcagcaggugcacuuuuaua

SEQ ID NO: 663 - RNA, 21 nt, Artificial Sequence
  siRNA sense strand against MASP2
cagcaggugcacuuuuauaug

SEQ ID NO: 664 - RNA, 21 nt, Artificial Sequence
  siRNA sense strand against MASP2
agcaggugcacuuuuauauga

SEQ ID NO: 665 - RNA, 21 nt, Artificial Sequence
  siRNA sense strand against MASP2
gcaggugcacuuuuauaugac

SEQ ID NO: 666 - RNA, 21 nt, Artificial Sequence
  siRNA sense strand against MASP2
caggugcacuuuuauaugaca

SEQ ID NO: 667 - RNA, 21 nt, Artificial Sequence
  siRNA sense strand against MASP2
aggugcacuuuuauaugacaa

SEQ ID NO: 668 - RNA, 21 nt, Artificial Sequence
  siRNA sense strand against MASP2
ggugcacuuuuauaugacaac

SEQ ID NO: 669 - RNA, 21 nt, Artificial Sequence
  siRNA sense strand against MASP2
gugcacuuuuauaugacaacu

SEQ ID NO: 670 - RNA, 21 nt, Artificial Sequence
  siRNA sense strand against MASP2
gcacuuuuauaugacaacugg

SEQ ID NO: 671 - RNA, 21 nt, Artificial Sequence
  siRNA sense strand against MASP2
cacuuuuauaugacaacuggg

SEQ ID NO: 672 - RNA, 21 nt, Artificial Sequence
  siRNA sense strand against MASP2
auaugacaacuggguccuaac

SEQ ID NO: 673 - RNA, 21 nt, Artificial Sequence
  siRNA sense strand against MASP2
uaugacaacuggguccuaaca

SEQ ID NO: 674 - RNA, 21 nt, Artificial Sequence
  siRNA sense strand against MASP2
caacuggguccuaacagcugc

SEQ ID NO: 675 - RNA, 21 nt, Artificial Sequence
  siRNA sense strand against MASP2
aacuggguccuaacagcugcu

SEQ ID NO: 676 - RNA, 21 nt, Artificial Sequence
  siRNA sense strand against MASP2
acuggguccuaacagcugcuc

SEQ ID NO: 677 - RNA, 21 nt, Artificial Sequence
  siRNA sense strand against MASP2
ggguccuaacagcugcucaug

SEQ ID NO: 678 - RNA, 21 nt, Artificial Sequence
  siRNA sense strand against MASP2
gguccuaacagcugcucaugc

SEQ ID NO: 679 - RNA, 21 nt, Artificial Sequence
  siRNA sense strand against MASP2
acagcugcucaugccgucuau

SEQ ID NO: 680 - RNA, 21 nt, Artificial Sequence
  siRNA sense strand against MASP2
agcugcucaugccgucuauga

SEQ ID NO: 681 - RNA, 21 nt, Artificial Sequence
  siRNA sense strand against MASP2
cugcucaugccgucuaugagc

SEQ ID NO: 682 - RNA, 21 nt, Artificial Sequence
  siRNA sense strand against MASP2
ucaugccgucuaugagcaaaa

SEQ ID NO: 683 - RNA, 21 nt, Artificial Sequence
  siRNA sense strand against MASP2
ugccgucuaugagcaaaaaca

SEQ ID NO: 684 - RNA, 21 nt, Artificial Sequence
  siRNA sense strand against MASP2
ccgucuaugagcaaaaacaug

SEQ ID NO: 685 - RNA, 21 nt, Artificial Sequence
  siRNA sense strand against MASP2
cgucuaugagcaaaaacauga

SEQ ID NO: 686 - RNA, 21 nt, Artificial Sequence
  siRNA sense strand against MASP2
ucuaugagcaaaaacaugaug

SEQ ID NO: 687 - RNA, 21 nt, Artificial Sequence
  siRNA sense strand against MASP2
cuaugagcaaaaacaugaugc

SEQ ID NO: 688 - RNA, 21 nt, Artificial Sequence
  siRNA sense strand against MASP2
ugagcaaaaacaugaugcauc

SEQ ID NO: 689 - RNA, 21 nt, Artificial Sequence
  siRNA sense strand against MASP2
gagcaaaaacaugaugcaucc

SEQ ID NO: 690 - RNA, 21 nt, Artificial Sequence
  siRNA sense strand against MASP2
gcaaaaacaugaugcauccgc

SEQ ID NO: 691 - RNA, 21 nt, Artificial Sequence
  siRNA sense strand against MASP2
gaugcauccgcccuggacauu

SEQ ID NO: 692 - RNA, 21 nt, Artificial Sequence
  siRNA sense strand against MASP2
augcauccgcccuggacauuc

SEQ ID NO: 693 - RNA, 21 nt, Artificial Sequence
  siRNA sense strand against MASP2
cccuggacauucgaaugggca

SEQ ID NO: 694 - RNA, 21 nt, Artificial Sequence
  siRNA sense strand against MASP2
ggacauucgaaugggcacccu

SEQ ID NO: 695 - RNA, 21 nt, Artificial Sequence
  siRNA sense strand against MASP2
acauucgaaugggcacccuga

SEQ ID NO: 696 - RNA, 21 nt, Artificial Sequence
  siRNA sense strand against MASP2
cauucgaaugggcacccugaa

SEQ ID NO: 697 - RNA, 21 nt, Artificial Sequence
  siRNA sense strand against MASP2
auucgaaugggcacccugaaa

SEQ ID NO: 698 - RNA, 21 nt, Artificial Sequence
  siRNA sense strand against MASP2
uucgaaugggcacccugaaaa

SEQ ID NO: 699 - RNA, 21 nt, Artificial Sequence
  siRNA sense strand against MASP2
ucgaaugggcacccugaaaag

SEQ ID NO: 700 - RNA, 21 nt, Artificial Sequence
  siRNA sense strand against MASP2
cgaaugggcacccugaaaaga

SEQ ID NO: 701 - RNA, 21 nt, Artificial Sequence
  siRNA sense strand against MASP2
gaaugggcacccugaaaagac

SEQ ID NO: 702 - RNA, 21 nt, Artificial Sequence
  siRNA sense strand against MASP2
ugggcacccugaaaagacuau

SEQ ID NO: 703 - RNA, 21 nt, Artificial Sequence
  siRNA sense strand against MASP2
gggcacccugaaaagacuauc

SEQ ID NO: 704 - RNA, 21 nt, Artificial Sequence
  siRNA sense strand against MASP2
ggcacccugaaaagacuauca

SEQ ID NO: 705 - RNA, 21 nt, Artificial Sequence
  siRNA sense strand against MASP2
gcacccugaaaagacuaucac

SEQ ID NO: 706 - RNA, 21 nt, Artificial Sequence
  siRNA sense strand against MASP2
cacccugaaaagacuaucacc

SEQ ID NO: 707 - RNA, 21 nt, Artificial Sequence
  siRNA sense strand against MASP2
acccugaaaagacuaucaccu

SEQ ID NO: 708 - RNA, 21 nt, Artificial Sequence
  siRNA sense strand against MASP2
cccugaaaagacuaucaccuc

SEQ ID NO: 709 - RNA, 21 nt, Artificial Sequence
  siRNA sense strand against MASP2
ccugaaaagacuaucaccuca

SEQ ID NO: 710 - RNA, 21 nt, Artificial Sequence
  siRNA sense strand against MASP2
cugaaaagacuaucaccucau

SEQ ID NO: 711 - RNA, 21 nt, Artificial Sequence
  siRNA sense strand against MASP2
ugaaaagacuaucaccucauu

SEQ ID NO: 712 - RNA, 21 nt, Artificial Sequence
  siRNA sense strand against MASP2
gaaaagacuaucaccucauua

SEQ ID NO: 713 - RNA, 21 nt, Artificial Sequence
  siRNA sense strand against MASP2
aagacuaucaccucauuauac

SEQ ID NO: 714 - RNA, 21 nt, Artificial Sequence
  siRNA sense strand against MASP2
agacuaucaccucauuauaca

SEQ ID NO: 715 - RNA, 21 nt, Artificial Sequence
  siRNA sense strand against MASP2
gacuaucaccucauuauacac

SEQ ID NO: 716 - RNA, 21 nt, Artificial Sequence
  siRNA sense strand against MASP2
acuaucaccucauuauacaca

SEQ ID NO: 717 - RNA, 21 nt, Artificial Sequence
  siRNA sense strand against MASP2
cuaucaccucauuauacacaa

SEQ ID NO: 718 - RNA, 21 nt, Artificial Sequence
  siRNA sense strand against MASP2
aucaccucauuauacacaagc

SEQ ID NO: 719 - RNA, 21 nt, Artificial Sequence
  siRNA sense strand against MASP2
ucaccucauuauacacaagcc

SEQ ID NO: 720 - RNA, 21 nt, Artificial Sequence
  siRNA sense strand against MASP2
accucauuauacacaagccug

SEQ ID NO: 721 - RNA, 21 nt, Artificial Sequence
  siRNA sense strand against MASP2
ccucauuauacacaagccugg

SEQ ID NO: 722 - RNA, 21 nt, Artificial Sequence
  siRNA sense strand against MASP2
cucauuauacacaagccuggu

SEQ ID NO: 723 - RNA, 21 nt, Artificial Sequence
  siRNA sense strand against MASP2
ucauuauacacaagccugguc

SEQ ID NO: 724 - RNA, 21 nt, Artificial Sequence
  siRNA sense strand against MASP2
cauuauacacaagccuggucu

SEQ ID NO: 725 - RNA, 21 nt, Artificial Sequence
  siRNA sense strand against MASP2
auuauacacaagccuggucug

SEQ ID NO: 726 - RNA, 21 nt, Artificial Sequence
  siRNA sense strand against MASP2
uuauacacaagccuggucuga

SEQ ID NO: 727 - RNA, 21 nt, Artificial Sequence
  siRNA sense strand against MASP2
uauacacaagccuggucugaa

SEQ ID NO: 728 - RNA, 21 nt, Artificial Sequence
  siRNA sense strand against MASP2
auacacaagccuggucugaag

SEQ ID NO: 729 - RNA, 21 nt, Artificial Sequence
  siRNA sense strand against MASP2
uacacaagccuggucugaagc

SEQ ID NO: 730 - RNA, 21 nt, Artificial Sequence
  siRNA sense strand against MASP2
acacaagccuggucugaagcu

SEQ ID NO: 731 - RNA, 21 nt, Artificial Sequence
  siRNA sense strand against MASP2
cacaagccuggucugaagcug

SEQ ID NO: 732 - RNA, 21 nt, Artificial Sequence
  siRNA sense strand against MASP2
acaagccuggucugaagcugu

SEQ ID NO: 733 - RNA, 21 nt, Artificial Sequence
  siRNA sense strand against MASP2
caagccuggucugaagcuguu

SEQ ID NO: 734 - RNA, 21 nt, Artificial Sequence
  siRNA sense strand against MASP2
aagccuggucugaagcuguuu

SEQ ID NO: 735 - RNA, 21 nt, Artificial Sequence
  siRNA sense strand against MASP2
agccuggucugaagcuguuuu

SEQ ID NO: 736 - RNA, 21 nt, Artificial Sequence
  siRNA sense strand against MASP2
gccuggucugaagcuguuuuu

SEQ ID NO: 737 - RNA, 21 nt, Artificial Sequence
  siRNA sense strand against MASP2
ccuggucugaagcuguuuuua

SEQ ID NO: 738 - RNA, 21 nt, Artificial Sequence
  siRNA sense strand against MASP2
cuggucugaagcuguuuuuau

SEQ ID NO: 739 - RNA, 21 nt, Artificial Sequence
  siRNA sense strand against MASP2
uggucugaagcuguuuuuaua

SEQ ID NO: 740 - RNA, 21 nt, Artificial Sequence
  siRNA sense strand against MASP2
ggucugaagcuguuuuuauac

SEQ ID NO: 741 - RNA, 21 nt, Artificial Sequence
  siRNA sense strand against MASP2
gucugaagcuguuuuuauaca

SEQ ID NO: 742 - RNA, 21 nt, Artificial Sequence
  siRNA sense strand against MASP2
cugaagcuguuuuuauacaug

SEQ ID NO: 743 - RNA, 21 nt, Artificial Sequence
  siRNA sense strand against MASP2
ugaagcuguuuuuauacauga

SEQ ID NO: 744 - RNA, 21 nt, Artificial Sequence
  siRNA sense strand against MASP2
gaagcuguuuuuauacaugaa

SEQ ID NO: 745 - RNA, 21 nt, Artificial Sequence
  siRNA sense strand against MASP2
aagcuguuuuuauacaugaag

SEQ ID NO: 746 - RNA, 21 nt, Artificial Sequence
  siRNA sense strand against MASP2
uuuuauacaugaagguuauac

SEQ ID NO: 747 - RNA, 21 nt, Artificial Sequence
  siRNA sense strand against MASP2
uauacaugaagguuauacuca

SEQ ID NO: 748 - RNA, 21 nt, Artificial Sequence
  siRNA sense strand against MASP2
acaugaagguuauacucauga

SEQ ID NO: 749 - RNA, 21 nt, Artificial Sequence
  siRNA sense strand against MASP2
ugaagguuauacucaugaugc

SEQ ID NO: 750 - RNA, 21 nt, Artificial Sequence
  siRNA sense strand against MASP2
gaagguuauacucaugaugcu

SEQ ID NO: 751 - RNA, 21 nt, Artificial Sequence
  siRNA sense strand against MASP2
agguuauacucaugaugcugg

SEQ ID NO: 752 - RNA, 21 nt, Artificial Sequence
  siRNA sense strand against MASP2
guuauacucaugaugcuggcu

SEQ ID NO: 753 - RNA, 21 nt, Artificial Sequence
  siRNA sense strand against MASP2
uacucaugaugcuggcuuuga

SEQ ID NO: 754 - RNA, 21 nt, Artificial Sequence
  siRNA sense strand against MASP2
acucaugaugcuggcuuugac

SEQ ID NO: 755 - RNA, 21 nt, Artificial Sequence
  siRNA sense strand against MASP2
cucaugaugcuggcuuugaca

SEQ ID NO: 756 - RNA, 21 nt, Artificial Sequence
  siRNA sense strand against MASP2
ucaugaugcuggcuuugacaa

SEQ ID NO: 757 - RNA, 21 nt, Artificial Sequence
  siRNA sense strand against MASP2
caugaugcuggcuuugacaau

SEQ ID NO: 758 - RNA, 21 nt, Artificial Sequence
  siRNA sense strand against MASP2
augaugcuggcuuugacaaug

SEQ ID NO: 759 - RNA, 21 nt, Artificial Sequence
  siRNA sense strand against MASP2
ugaugcuggcuuugacaauga

SEQ ID NO: 760 - RNA, 21 nt, Artificial Sequence
  siRNA sense strand against MASP2
gaugcuggcuuugacaaugac

SEQ ID NO: 761 - RNA, 21 nt, Artificial Sequence
  siRNA sense strand against MASP2
augcuggcuuugacaaugaca

SEQ ID NO: 762 - RNA, 21 nt, Artificial Sequence
  siRNA sense strand against MASP2
gcuggcuuugacaaugacaua

SEQ ID NO: 763 - RNA, 21 nt, Artificial Sequence
  siRNA sense strand against MASP2
cuggcuuugacaaugacauag

SEQ ID NO: 764 - RNA, 21 nt, Artificial Sequence
  siRNA sense strand against MASP2
uggcuuugacaaugacauagc

SEQ ID NO: 765 - RNA, 21 nt, Artificial Sequence
  siRNA sense strand against MASP2
ggcuuugacaaugacauagca

SEQ ID NO: 766 - RNA, 21 nt, Artificial Sequence
  siRNA sense strand against MASP2
gcuuugacaaugacauagcac

SEQ ID NO: 767 - RNA, 21 nt, Artificial Sequence
  siRNA sense strand against MASP2
cuuugacaaugacauagcacu

SEQ ID NO: 768 - RNA, 21 nt, Artificial Sequence
  siRNA sense strand against MASP2
uugacaaugacauagcacuga

SEQ ID NO: 769 - RNA, 21 nt, Artificial Sequence
  siRNA sense strand against MASP2
gacaaugacauagcacugauu

SEQ ID NO: 770 - RNA, 21 nt, Artificial Sequence
  siRNA sense strand against MASP2
acaaugacauagcacugauua

SEQ ID NO: 771 - RNA, 21 nt, Artificial Sequence
  siRNA sense strand against MASP2
caaugacauagcacugauuaa

SEQ ID NO: 772 - RNA, 21 nt, Artificial Sequence
  siRNA sense strand against MASP2
aaugacauagcacugauuaaa

SEQ ID NO: 773 - RNA, 21 nt, Artificial Sequence
  siRNA sense strand against MASP2
augacauagcacugauuaaau

SEQ ID NO: 774 - RNA, 21 nt, Artificial Sequence
  siRNA sense strand against MASP2
ugacauagcacugauuaaauu

SEQ ID NO: 775 - RNA, 21 nt, Artificial Sequence
  siRNA sense strand against MASP2
gacauagcacugauuaaauug

SEQ ID NO: 776 - RNA, 21 nt, Artificial Sequence
  siRNA sense strand against MASP2
acauagcacugauuaaauuga

SEQ ID NO: 777 - RNA, 21 nt, Artificial Sequence
  siRNA sense strand against MASP2
cauagcacugauuaaauugaa

SEQ ID NO: 778 - RNA, 21 nt, Artificial Sequence
  siRNA sense strand against MASP2
auagcacugauuaaauugaau

SEQ ID NO: 779 - RNA, 21 nt, Artificial Sequence
  siRNA sense strand against MASP2
uagcacugauuaaauugaaua

SEQ ID NO: 780 - RNA, 21 nt, Artificial Sequence
  siRNA sense strand against MASP2
agcacugauuaaauugaauaa

SEQ ID NO: 781 - RNA, 21 nt, Artificial Sequence
  siRNA sense strand against MASP2
gcacugauuaaauugaauaac

SEQ ID NO: 782 - RNA, 21 nt, Artificial Sequence
  siRNA sense strand against MASP2
cacugauuaaauugaauaaca

SEQ ID NO: 783 - RNA, 21 nt, Artificial Sequence
  siRNA sense strand against MASP2
cugauuaaauugaauaacaaa

SEQ ID NO: 784 - RNA, 21 nt, Artificial Sequence
  siRNA sense strand against MASP2
ugauuaaauugaauaacaaag

SEQ ID NO: 785 - RNA, 21 nt, Artificial Sequence
  siRNA sense strand against MASP2
gauuaaauugaauaacaaagu

SEQ ID NO: 786 - RNA, 21 nt, Artificial Sequence
  siRNA sense strand against MASP2
aauugaauaacaaaguuguaa

SEQ ID NO: 787 - RNA, 21 nt, Artificial Sequence
  siRNA sense strand against MASP2
aauaacaaaguuguaaucaau

SEQ ID NO: 788 - RNA, 21 nt, Artificial Sequence
  siRNA sense strand against MASP2
auaacaaaguuguaaucaaua

SEQ ID NO: 789 - RNA, 21 nt, Artificial Sequence
  siRNA sense strand against MASP2
uaacaaaguuguaaucaauag

SEQ ID NO: 790 - RNA, 21 nt, Artificial Sequence
  siRNA sense strand against MASP2
aacaaaguuguaaucaauagc

SEQ ID NO: 791 - RNA, 21 nt, Artificial Sequence
  siRNA sense strand against MASP2
aaguuguaaucaauagcaaca

SEQ ID NO: 792 - RNA, 21 nt, Artificial Sequence
  siRNA sense strand against MASP2
guuguaaucaauagcaacauc

SEQ ID NO: 793 - RNA, 21 nt, Artificial Sequence
  siRNA sense strand against MASP2
guaaucaauagcaacaucacg

SEQ ID NO: 794 - RNA, 21 nt, Artificial Sequence
  siRNA sense strand against MASP2
aaucaauagcaacaucacgcc

SEQ ID NO: 795 - RNA, 21 nt, Artificial Sequence
  siRNA sense strand against MASP2
cuauuugucugccaagaaaag

SEQ ID NO: 796 - RNA, 21 nt, Artificial Sequence
  siRNA sense strand against MASP2
uauuugucugccaagaaaaga

SEQ ID NO: 797 - RNA, 21 nt, Artificial Sequence
  siRNA sense strand against MASP2
auuugucugccaagaaaagaa

SEQ ID NO: 798 - RNA, 21 nt, Artificial Sequence
  siRNA sense strand against MASP2
ugccaagaaaagaagcugaau

SEQ ID NO: 799 - RNA, 21 nt, Artificial Sequence
  siRNA sense strand against MASP2
ccaagaaaagaagcugaaucc

SEQ ID NO: 800 - RNA, 21 nt, Artificial Sequence
  siRNA sense strand against MASP2
gaagcugaauccuuuaugagg

SEQ ID NO: 801 - RNA, 21 nt, Artificial Sequence
  siRNA sense strand against MASP2
gcugaauccuuuaugaggaca

SEQ ID NO: 802 - RNA, 21 nt, Artificial Sequence
  siRNA sense strand against MASP2
cugaauccuuuaugaggacag

SEQ ID NO: 803 - RNA, 21 nt, Artificial Sequence
  siRNA sense strand against MASP2
aggacagaugacauuggaacu

SEQ ID NO: 804 - RNA, 21 nt, Artificial Sequence
  siRNA sense strand against MASP2
ggacagaugacauuggaacug

SEQ ID NO: 805 - RNA, 21 nt, Artificial Sequence
  siRNA sense strand against MASP2
cauuggaacugcaucuggaug

SEQ ID NO: 806 - RNA, 21 nt, Artificial Sequence
  siRNA sense strand against MASP2
aacugcaucuggauggggauu

SEQ ID NO: 807 - RNA, 21 nt, Artificial Sequence
  siRNA sense strand against MASP2
cugcaucuggauggggauuaa

SEQ ID NO: 808 - RNA, 21 nt, Artificial Sequence
  siRNA sense strand against MASP2
ggauggggauuaacccaaagg

SEQ ID NO: 809 - RNA, 21 nt, Artificial Sequence
  siRNA sense strand against MASP2
gggguuuucuugcuagaaauc

SEQ ID NO: 810 - RNA, 21 nt, Artificial Sequence
  siRNA sense strand against MASP2
ggguuuucuugcuagaaaucu

SEQ ID NO: 811 - RNA, 21 nt, Artificial Sequence
  siRNA sense strand against MASP2
gguuuucuugcuagaaaucua

SEQ ID NO: 812 - RNA, 21 nt, Artificial Sequence
  siRNA sense strand against MASP2
guuuucuugcuagaaaucuaa

SEQ ID NO: 813 - RNA, 21 nt, Artificial Sequence
  siRNA sense strand against MASP2
uuuucuugcuagaaaucuaau

SEQ ID NO: 814 - RNA, 21 nt, Artificial Sequence
  siRNA sense strand against MASP2
uuucuugcuagaaaucuaaug

SEQ ID NO: 815 - RNA, 21 nt, Artificial Sequence
  siRNA sense strand against MASP2
cuugcuagaaaucuaauguau

SEQ ID NO: 816 - RNA, 21 nt, Artificial Sequence
  siRNA sense strand against MASP2
uugcuagaaaucuaauguaug

SEQ ID NO: 817 - RNA, 21 nt, Artificial Sequence
  siRNA sense strand against MASP2
ugcuagaaaucuaauguaugu

SEQ ID NO: 818 - RNA, 21 nt, Artificial Sequence
  siRNA sense strand against MASP2
aucuaauguaugucgacauac

SEQ ID NO: 819 - RNA, 21 nt, Artificial Sequence
  siRNA sense strand against MASP2
ucuaauguaugucgacauacc

SEQ ID NO: 820 - RNA, 21 nt, Artificial Sequence
  siRNA sense strand against MASP2
uaauguaugucgacauaccga

SEQ ID NO: 821 - RNA, 21 nt, Artificial Sequence
  siRNA sense strand against MASP2
auguaugucgacauaccgauu

SEQ ID NO: 822 - RNA, 21 nt, Artificial Sequence
  siRNA sense strand against MASP2
uguaugucgacauaccgauug

SEQ ID NO: 823 - RNA, 21 nt, Artificial Sequence
  siRNA sense strand against MASP2
augucgacauaccgauuguug

SEQ ID NO: 824 - RNA, 21 nt, Artificial Sequence
  siRNA sense strand against MASP2
ugucgacauaccgauuguuga

SEQ ID NO: 825 - RNA, 21 nt, Artificial Sequence
  siRNA sense strand against MASP2
ccgauuguugaccaucaaaaa

SEQ ID NO: 826 - RNA, 21 nt, Artificial Sequence
  siRNA sense strand against MASP2
cgauuguugaccaucaaaaau

SEQ ID NO: 827 - RNA, 21 nt, Artificial Sequence
  siRNA sense strand against MASP2
gauuguugaccaucaaaaaug

SEQ ID NO: 828 - RNA, 21 nt, Artificial Sequence
  siRNA sense strand against MASP2
uguugaccaucaaaaauguac

SEQ ID NO: 829 - RNA, 21 nt, Artificial Sequence
  siRNA sense strand against MASP2
guugaccaucaaaaauguacu

SEQ ID NO: 830 - RNA, 21 nt, Artificial Sequence
  siRNA sense strand against MASP2
uugaccaucaaaaauguacug

SEQ ID NO: 831 - RNA, 21 nt, Artificial Sequence
  siRNA sense strand against MASP2
aaaauguacugcugcauauga

SEQ ID NO: 832 - RNA, 21 nt, Artificial Sequence
  siRNA sense strand against MASP2
uguacugcugcauaugaaaag

SEQ ID NO: 833 - RNA, 21 nt, Artificial Sequence
  siRNA sense strand against MASP2
cugcugcauaugaaaagccac

SEQ ID NO: 834 - RNA, 21 nt, Artificial Sequence
  siRNA sense strand against MASP2
ugcugcauaugaaaagccacc

SEQ ID NO: 835 - RNA, 21 nt, Artificial Sequence
  siRNA sense strand against MASP2
gcugcauaugaaaagccaccc

SEQ ID NO: 836 - RNA, 21 nt, Artificial Sequence
  siRNA sense strand against MASP2
cauaugaaaagccacccuauc

SEQ ID NO: 837 - RNA, 21 nt, Artificial Sequence
  siRNA sense strand against MASP2
ccacccuauccaaggggaagu

SEQ ID NO: 838 - RNA, 21 nt, Artificial Sequence
  siRNA sense strand against MASP2
uauccaaggggaaguguaacu

SEQ ID NO: 839 - RNA, 21 nt, Artificial Sequence
  siRNA sense strand against MASP2
uccaaggggaaguguaacugc

SEQ ID NO: 840 - RNA, 21 nt, Artificial Sequence
  siRNA sense strand against MASP2
aaguguaacugcuaacaugcu

SEQ ID NO: 841 - RNA, 21 nt, Artificial Sequence
  siRNA sense strand against MASP2
guguaacugcuaacaugcuuu

SEQ ID NO: 842 - RNA, 21 nt, Artificial Sequence
  siRNA sense strand against MASP2
cugcuaacaugcuuugugcug

SEQ ID NO: 843 - RNA, 21 nt, Artificial Sequence
  siRNA sense strand against MASP2
ugcuaacaugcuuugugcugg

SEQ ID NO: 844 - RNA, 21 nt, Artificial Sequence
  siRNA sense strand against MASP2
caugcuuugugcuggcuuaga

SEQ ID NO: 845 - RNA, 21 nt, Artificial Sequence
  siRNA sense strand against MASP2
ugcuuugugcuggcuuagaaa

SEQ ID NO: 846 - RNA, 21 nt, Artificial Sequence
  siRNA sense strand against MASP2
gcuuugugcuggcuuagaaag

SEQ ID NO: 847 - RNA, 21 nt, Artificial Sequence
  siRNA sense strand against MASP2
aggacagcugcagaggugaca

SEQ ID NO: 848 - RNA, 21 nt, Artificial Sequence
  siRNA sense strand against MASP2
ugcagaggugacagcggaggg

SEQ ID NO: 849 - RNA, 21 nt, Artificial Sequence
  siRNA sense strand against MASP2
gggcacugguguuucuagaua

SEQ ID NO: 850 - RNA, 21 nt, Artificial Sequence
  siRNA sense strand against MASP2
gcacugguguuucuagauagu

SEQ ID NO: 851 - RNA, 21 nt, Artificial Sequence
  siRNA sense strand against MASP2
ugguguuucuagauagugaaa

SEQ ID NO: 852 - RNA, 21 nt, Artificial Sequence
  siRNA sense strand against MASP2
guuucuagauagugaaacaga

SEQ ID NO: 853 - RNA, 21 nt, Artificial Sequence
  siRNA sense strand against MASP2
gugaaacagagaggugguuug

SEQ ID NO: 854 - RNA, 21 nt, Artificial Sequence
  siRNA sense strand against MASP2
gaaacagagaggugguuugug

SEQ ID NO: 855 - RNA, 21 nt, Artificial Sequence
  siRNA sense strand against MASP2
gagaggugguuugugggagga

SEQ ID NO: 856 - RNA, 21 nt, Artificial Sequence
  siRNA sense strand against MASP2
ggugguuugugggaggaauag

SEQ ID NO: 857 - RNA, 21 nt, Artificial Sequence
  siRNA sense strand against MASP2
gaggaauaguguccugggguu

SEQ ID NO: 858 - RNA, 21 nt, Artificial Sequence
  siRNA sense strand against MASP2
aggaauaguguccugggguuc

SEQ ID NO: 859 - RNA, 21 nt, Artificial Sequence
  siRNA sense strand against MASP2
uaguguccugggguuccauga

SEQ ID NO: 860 - RNA, 21 nt, Artificial Sequence
  siRNA sense strand against MASP2
ggguuccaugaauugugggga

SEQ ID NO: 861 - RNA, 21 nt, Artificial Sequence
  siRNA sense strand against MASP2
caugaauuguggggaagcagg

SEQ ID NO: 862 - RNA, 21 nt, Artificial Sequence
  siRNA sense strand against MASP2
uguggggaagcaggucaguau

SEQ ID NO: 863 - RNA, 21 nt, Artificial Sequence
  siRNA sense strand against MASP2
gcaggucaguauggagucuac

SEQ ID NO: 864 - RNA, 21 nt, Artificial Sequence
  siRNA sense strand against MASP2
caggucaguauggagucuaca

SEQ ID NO: 865 - RNA, 21 nt, Artificial Sequence
  siRNA sense strand against MASP2
aggucaguauggagucuacac

SEQ ID NO: 866 - RNA, 21 nt, Artificial Sequence
  siRNA sense strand against MASP2
ggucaguauggagucuacaca

SEQ ID NO: 867 - RNA, 21 nt, Artificial Sequence
  siRNA sense strand against MASP2
ucaguauggagucuacacaaa

SEQ ID NO: 868 - RNA, 21 nt, Artificial Sequence
  siRNA sense strand against MASP2
caguauggagucuacacaaaa

SEQ ID NO: 869 - RNA, 21 nt, Artificial Sequence
  siRNA sense strand against MASP2
aguauggagucuacacaaaag

SEQ ID NO: 870 - RNA, 21 nt, Artificial Sequence
  siRNA sense strand against MASP2
uauggagucuacacaaaaguu

SEQ ID NO: 871 - RNA, 21 nt, Artificial Sequence
  siRNA sense strand against MASP2
ggagucuacacaaaaguuauu

SEQ ID NO: 872 - RNA, 21 nt, Artificial Sequence
  siRNA sense strand against MASP2
gagucuacacaaaaguuauua

SEQ ID NO: 873 - RNA, 21 nt, Artificial Sequence
  siRNA sense strand against MASP2
cuacacaaaaguuauuaacua

SEQ ID NO: 874 - RNA, 21 nt, Artificial Sequence
  siRNA sense strand against MASP2
uuauuaacuauauucccugga

SEQ ID NO: 875 - RNA, 21 nt, Artificial Sequence
  siRNA sense strand against MASP2
cuauauucccuggaucgagaa

SEQ ID NO: 876 - RNA, 21 nt, Artificial Sequence
  siRNA sense strand against MASP2
auauucccuggaucgagaaca

SEQ ID NO: 877 - RNA, 21 nt, Artificial Sequence
  siRNA sense strand against MASP2
cccuggaucgagaacauaauu

SEQ ID NO: 878 - RNA, 21 nt, Artificial Sequence
  siRNA sense strand against MASP2
cuggaucgagaacauaauuag

SEQ ID NO: 879 - RNA, 21 nt, Artificial Sequence
  siRNA sense strand against MASP2
gaucgagaacauaauuaguga

SEQ ID NO: 880 - RNA, 21 nt, Artificial Sequence
  siRNA sense strand against MASP2
ucgagaacauaauuagugauu

SEQ ID NO: 881 - RNA, 21 nt, Artificial Sequence
  siRNA sense strand against MASP2
cgagaacauaauuagugauuu

SEQ ID NO: 882 - RNA, 21 nt, Artificial Sequence
  siRNA sense strand against MASP2
acauaauuagugauuuuuaac

SEQ ID NO: 883 - RNA, 21 nt, Artificial Sequence
  siRNA sense strand against MASP2
cauaauuagugauuuuuaacu

SEQ ID NO: 884 - RNA, 21 nt, Artificial Sequence
  siRNA sense strand against MASP2
auaauuagugauuuuuaacuu

SEQ ID NO: 885 - RNA, 21 nt, Artificial Sequence
  siRNA sense strand against MASP2
cuugcgugucugcagucaagg

SEQ ID NO: 886 - RNA, 21 nt, Artificial Sequence
  siRNA sense strand against MASP2
gcgugucugcagucaaggauu

SEQ ID NO: 887 - RNA, 21 nt, Artificial Sequence
  siRNA sense strand against MASP2
cugcagucaaggauucuucau

SEQ ID NO: 888 - RNA, 21 nt, Artificial Sequence
  siRNA sense strand against MASP2
gcagucaaggauucuucauuu

SEQ ID NO: 889 - RNA, 21 nt, Artificial Sequence
  siRNA sense strand against MASP2
gucaaggauucuucauuuuua

SEQ ID NO: 890 - RNA, 21 nt, Artificial Sequence
  siRNA sense strand against MASP2
caaggauucuucauuuuuaga

SEQ ID NO: 891 - RNA, 21 nt, Artificial Sequence
  siRNA sense strand against MASP2
auucuucauuuuuagaaaugc

SEQ ID NO: 892 - RNA, 21 nt, Artificial Sequence
  siRNA sense strand against MASP2
gaccuuggcagcgacguggcu

SEQ ID NO: 893 - RNA, 21 nt, Artificial Sequence
  siRNA sense strand against MASP2
agcgacguggcucgagaagca

SEQ ID NO: 894 - RNA, 21 nt, Artificial Sequence
  siRNA sense strand against MASP2
gcucgagaagcauucaucauu

SEQ ID NO: 895 - RNA, 21 nt, Artificial Sequence
  siRNA sense strand against MASP2
gcauucaucauuacuguggac

SEQ ID NO: 896 - RNA, 21 nt, Artificial Sequence
  siRNA sense strand against MASP2
cauucaucauuacuguggaca

SEQ ID NO: 897 - RNA, 21 nt, Artificial Sequence
  siRNA sense strand against MASP2
caucauuacuguggacauggc

SEQ ID NO: 898 - RNA, 21 nt, Artificial Sequence
  siRNA sense strand against MASP2
aucauuacuguggacauggca

SEQ ID NO: 899 - RNA, 21 nt, Artificial Sequence
  siRNA sense strand against MASP2
cauuacuguggacauggcagu

SEQ ID NO: 900 - RNA, 21 nt, Artificial Sequence
  siRNA sense strand against MASP2
aguuguugcuccacccaaaaa

SEQ ID NO: 901 - RNA, 21 nt, Artificial Sequence
  siRNA sense strand against MASP2
uccaggugaggcugcugucau

SEQ ID NO: 902 - RNA, 21 nt, Artificial Sequence
  siRNA sense strand against MASP2
gugaggcugcugucauuucuc

SEQ ID NO: 903 - RNA, 21 nt, Artificial Sequence
  siRNA sense strand against MASP2
cugcugucauuucuccacuug

SEQ ID NO: 904 - RNA, 21 nt, Artificial Sequence
  siRNA sense strand against MASP2
cugucauuucuccacuugcca

SEQ ID NO: 905 - RNA, 21 nt, Artificial Sequence
  siRNA sense strand against MASP2
cauuucuccacuugccaguuu

SEQ ID NO: 906 - RNA, 21 nt, Artificial Sequence
  siRNA sense strand against MASP2
ucuccacuugccaguuuaauu

SEQ ID NO: 907 - RNA, 21 nt, Artificial Sequence
  siRNA sense strand against MASP2
cuccacuugccaguuuaauuc

SEQ ID NO: 908 - RNA, 21 nt, Artificial Sequence
  siRNA sense strand against MASP2
guuuaauuccagccuuaccca

SEQ ID NO: 909 - RNA, 21 nt, Artificial Sequence
  siRNA sense strand against MASP2
uuccagccuuacccauugacu

SEQ ID NO: 910 - RNA, 21 nt, Artificial Sequence
  siRNA sense strand against MASP2
cauugacucaaggggacauaa

SEQ ID NO: 911 - RNA, 21 nt, Artificial Sequence
  siRNA sense strand against MASP2
auugacucaaggggacauaaa

SEQ ID NO: 912 - RNA, 21 nt, Artificial Sequence
  siRNA sense strand against MASP2
aaggggacauaaaccacgaga

SEQ ID NO: 913 - RNA, 21 nt, Artificial Sequence
  siRNA sense strand against MASP2
ggggacauaaaccacgagagu

SEQ ID NO: 914 - RNA, 21 nt, Artificial Sequence
  siRNA sense strand against MASP2
ggacauaaaccacgagaguga

SEQ ID NO: 915 - RNA, 21 nt, Artificial Sequence
  siRNA sense strand against MASP2
gacauaaaccacgagagugac

SEQ ID NO: 916 - RNA, 21 nt, Artificial Sequence
  siRNA sense strand against MASP2
cauaaaccacgagagugacag

SEQ ID NO: 917 - RNA, 21 nt, Artificial Sequence
  siRNA sense strand against MASP2
auaaaccacgagagugacagu

SEQ ID NO: 918 - RNA, 21 nt, Artificial Sequence
  siRNA sense strand against MASP2
ccacgagagugacagucaucu

SEQ ID NO: 919 - RNA, 21 nt, Artificial Sequence
  siRNA sense strand against MASP2
cgagagugacagucaucuuug

SEQ ID NO: 920 - RNA, 21 nt, Artificial Sequence
  siRNA sense strand against MASP2
aucuuugcccacccaguguaa

SEQ ID NO: 921 - RNA, 21 nt, Artificial Sequence
  siRNA sense strand against MASP2
cuuugcccacccaguguaaug

SEQ ID NO: 922 - RNA, 21 nt, Artificial Sequence
  siRNA sense strand against MASP2
ugcccacccaguguaauguca

SEQ ID NO: 923 - RNA, 21 nt, Artificial Sequence
  siRNA sense strand against MASP2
gcccacccaguguaaugucac

SEQ ID NO: 924 - RNA, 21 nt, Artificial Sequence
  siRNA sense strand against MASP2
ccacccaguguaaugucacug

SEQ ID NO: 925 - RNA, 21 nt, Artificial Sequence
  siRNA sense strand against MASP2
acccaguguaaugucacugcu

SEQ ID NO: 926 - RNA, 21 nt, Artificial Sequence
  siRNA sense strand against MASP2
cccaguguaaugucacugcuc

SEQ ID NO: 927 - RNA, 21 nt, Artificial Sequence
  siRNA sense strand against MASP2
ccaguguaaugucacugcuca

SEQ ID NO: 928 - RNA, 21 nt, Artificial Sequence
  siRNA sense strand against MASP2
gcucaaauuacauuucauuac

SEQ ID NO: 929 - RNA, 21 nt, Artificial Sequence
  siRNA sense strand against MASP2
aauuacauuucauuaccuuaa

SEQ ID NO: 930 - RNA, 21 nt, Artificial Sequence
  siRNA sense strand against MASP2
auuacauuucauuaccuuaaa

SEQ ID NO: 931 - RNA, 21 nt, Artificial Sequence
  siRNA sense strand against MASP2
acauuucauuaccuuaaaaag

SEQ ID NO: 932 - RNA, 21 nt, Artificial Sequence
  siRNA sense strand against MASP2
cauuucauuaccuuaaaaagc

SEQ ID NO: 933 - RNA, 21 nt, Artificial Sequence
  siRNA sense strand against MASP2
ucauuaccuuaaaaagccagu

SEQ ID NO: 934 - RNA, 21 nt, Artificial Sequence
  siRNA sense strand against MASP2
gcuguuggcauuucuguaaac

SEQ ID NO: 935 - RNA, 21 nt, Artificial Sequence
  siRNA sense strand against MASP2
cuguuggcauuucuguaaacu

SEQ ID NO: 936 - RNA, 21 nt, Artificial Sequence
  siRNA sense strand against MASP2
guuggcauuucuguaaacugc

SEQ ID NO: 937 - RNA, 21 nt, Artificial Sequence
  siRNA sense strand against MASP2
uguaaacugccuguccaugcu

SEQ ID NO: 938 - RNA, 21 nt, Artificial Sequence
  siRNA sense strand against MASP2
guaaacugccuguccaugcuc

SEQ ID NO: 939 - RNA, 21 nt, Artificial Sequence
  siRNA sense strand against MASP2
uaaacugccuguccaugcucu

SEQ ID NO: 940 - RNA, 21 nt, Artificial Sequence
  siRNA sense strand against MASP2
uguccaugcucuuuguuuuua

SEQ ID NO: 941 - RNA, 21 nt, Artificial Sequence
  siRNA sense strand against MASP2
caugcucuuuguuuuuaaacu

SEQ ID NO: 942 - RNA, 21 nt, Artificial Sequence
  siRNA sense strand against MASP2
ucuuuguuuuuaaacuuguuc

SEQ ID NO: 943 - RNA, 21 nt, Artificial Sequence
  siRNA antisense strand against MASP2
guccagcuggccuggccuggu

SEQ ID NO: 944 - RNA, 21 nt, Artificial Sequence
  siRNA antisense strand against MASP2
cccguccagcuggccuggccu

SEQ ID NO: 945 - RNA, 21 nt, Artificial Sequence
  siRNA antisense strand against MASP2
ugcccguccagcuggccuggc

SEQ ID NO: 946 - RNA, 21 nt, Artificial Sequence
  siRNA antisense strand against MASP2
gugcccguccagcuggccugg

SEQ ID NO: 947 - RNA, 21 nt, Artificial Sequence
  siRNA antisense strand against MASP2
ugugcccguccagcuggccug

SEQ ID NO: 948 - RNA, 21 nt, Artificial Sequence
  siRNA antisense strand against MASP2
uggugugcccguccagcuggc

SEQ ID NO: 949 - RNA, 21 nt, Artificial Sequence
  siRNA antisense strand against MASP2
auggugugcccguccagcugg

SEQ ID NO: 950 - RNA, 21 nt, Artificial Sequence
  siRNA antisense strand against MASP2
ucauggugugcccguccagcu

SEQ ID NO: 951 - RNA, 21 nt, Artificial Sequence
  siRNA antisense strand against MASP2
ccucauggugugcccguccag

SEQ ID NO: 952 - RNA, 21 nt, Artificial Sequence
  siRNA antisense strand against MASP2
agccucauggugugcccgucc

SEQ ID NO: 953 - RNA, 21 nt, Artificial Sequence
  siRNA antisense strand against MASP2
cagccucauggugugcccguc

SEQ ID NO: 954 - RNA, 21 nt, Artificial Sequence
  siRNA antisense strand against MASP2
gcagccucauggugugcccgu

SEQ ID NO: 955 - RNA, 21 nt, Artificial Sequence
  siRNA antisense strand against MASP2
agcagccucauggugugcccg

SEQ ID NO: 956 - RNA, 21 nt, Artificial Sequence
  siRNA antisense strand against MASP2
agggucagcagccucauggug

SEQ ID NO: 957 - RNA, 21 nt, Artificial Sequence
  siRNA antisense strand against MASP2
gagggucagcagccucauggu

SEQ ID NO: 958 - RNA, 21 nt, Artificial Sequence
  siRNA antisense strand against MASP2
caggagggucagcagccucau

SEQ ID NO: 959 - RNA, 21 nt, Artificial Sequence
  siRNA antisense strand against MASP2
cccaggagggucagcagccuc

SEQ ID NO: 960 - RNA, 21 nt, Artificial Sequence
  siRNA antisense strand against MASP2
gcccaggagggucagcagccu

SEQ ID NO: 961 - RNA, 21 nt, Artificial Sequence
  siRNA antisense strand against MASP2
ggcccaggagggucagcagcc

SEQ ID NO: 962 - RNA, 21 nt, Artificial Sequence
  siRNA antisense strand against MASP2
aggcccaggagggucagcagc

SEQ ID NO: 963 - RNA, 21 nt, Artificial Sequence
  siRNA antisense strand against MASP2
gaaggcccaggagggucagca

SEQ ID NO: 964 - RNA, 21 nt, Artificial Sequence
  siRNA antisense strand against MASP2
agaaggcccaggagggucagc

SEQ ID NO: 965 - RNA, 21 nt, Artificial Sequence
  siRNA antisense strand against MASP2
cacagaaggcccaggaggguc

SEQ ID NO: 966 - RNA, 21 nt, Artificial Sequence
  siRNA antisense strand against MASP2
acacagaaggcccaggagggu

SEQ ID NO: 967 - RNA, 21 nt, Artificial Sequence
  siRNA antisense strand against MASP2
agccacacagaaggcccagga

SEQ ID NO: 968 - RNA, 21 nt, Artificial Sequence
  siRNA antisense strand against MASP2
cgagccacacagaaggcccag

SEQ ID NO: 969 - RNA, 21 nt, Artificial Sequence
  siRNA antisense strand against MASP2
ccgagccacacagaaggccca

SEQ ID NO: 970 - RNA, 21 nt, Artificial Sequence
  siRNA antisense strand against MASP2
caccgagccacacagaaggcc

SEQ ID NO: 971 - RNA, 21 nt, Artificial Sequence
  siRNA antisense strand against MASP2
ccaccgagccacacagaaggc

SEQ ID NO: 972 - RNA, 21 nt, Artificial Sequence
  siRNA antisense strand against MASP2
uggccaccgagccacacagaa

SEQ ID NO: 973 - RNA, 21 nt, Artificial Sequence
  siRNA antisense strand against MASP2
gguggccaccgagccacacag

SEQ ID NO: 974 - RNA, 21 nt, Artificial Sequence
  siRNA antisense strand against MASP2
aaggggguggccaccgagcca

SEQ ID NO: 975 - RNA, 21 nt, Artificial Sequence
  siRNA antisense strand against MASP2
caaggggguggccaccgagcc

SEQ ID NO: 976 - RNA, 21 nt, Artificial Sequence
  siRNA antisense strand against MASP2
uucgggcccaaggggguggcc

SEQ ID NO: 977 - RNA, 21 nt, Artificial Sequence
  siRNA antisense strand against MASP2
cacuucgggcccaagggggug

SEQ ID NO: 978 - RNA, 21 nt, Artificial Sequence
  siRNA antisense strand against MASP2
guucaggccacuucgggccca

SEQ ID NO: 979 - RNA, 21 nt, Artificial Sequence
  siRNA antisense strand against MASP2
gguucaggccacuucgggccc

SEQ ID NO: 980 - RNA, 21 nt, Artificial Sequence
  siRNA antisense strand against MASP2
agguucaggccacuucgggcc

SEQ ID NO: 981 - RNA, 21 nt, Artificial Sequence
  siRNA antisense strand against MASP2
cagguucaggccacuucgggc

SEQ ID NO: 982 - RNA, 21 nt, Artificial Sequence
  siRNA antisense strand against MASP2
acagguucaggccacuucggg

SEQ ID NO: 983 - RNA, 21 nt, Artificial Sequence
  siRNA antisense strand against MASP2
acacagguucaggccacuucg

SEQ ID NO: 984 - RNA, 21 nt, Artificial Sequence
  siRNA antisense strand against MASP2
aacacagguucaggccacuuc

SEQ ID NO: 985 - RNA, 21 nt, Artificial Sequence
  siRNA antisense strand against MASP2
gaacacagguucaggccacuu

SEQ ID NO: 986 - RNA, 21 nt, Artificial Sequence
  siRNA antisense strand against MASP2
cgaacacagguucaggccacu

SEQ ID NO: 987 - RNA, 21 nt, Artificial Sequence
  siRNA antisense strand against MASP2
ccgaacacagguucaggccac

SEQ ID NO: 988 - RNA, 21 nt, Artificial Sequence
  siRNA antisense strand against MASP2
cccgaacacagguucaggcca

SEQ ID NO: 989 - RNA, 21 nt, Artificial Sequence
  siRNA antisense strand against MASP2
gcccgaacacagguucaggcc

SEQ ID NO: 990 - RNA, 21 nt, Artificial Sequence
  siRNA antisense strand against MASP2
ggcgcccgaacacagguucag

SEQ ID NO: 991 - RNA, 21 nt, Artificial Sequence
  siRNA antisense strand against MASP2
caggcgcccgaacacagguuc

SEQ ID NO: 992 - RNA, 21 nt, Artificial Sequence
  siRNA antisense strand against MASP2
augccaggcgcccgaacacag

SEQ ID NO: 993 - RNA, 21 nt, Artificial Sequence
  siRNA antisense strand against MASP2
aaagccgggggaugccaggcg

SEQ ID NO: 994 - RNA, 21 nt, Artificial Sequence
  siRNA antisense strand against MASP2
gaaagccgggggaugccaggc

SEQ ID NO: 995 - RNA, 21 nt, Artificial Sequence
  siRNA antisense strand against MASP2
uacuccccuggaaagccgggg

SEQ ID NO: 996 - RNA, 21 nt, Artificial Sequence
  siRNA antisense strand against MASP2
auacuccccuggaaagccggg

SEQ ID NO: 997 - RNA, 21 nt, Artificial Sequence
  siRNA antisense strand against MASP2
cauacuccccuggaaagccgg

SEQ ID NO: 998 - RNA, 21 nt, Artificial Sequence
  siRNA antisense strand against MASP2
uggcauacuccccuggaaagc

SEQ ID NO: 999 - RNA, 21 nt, Artificial Sequence
  siRNA antisense strand against MASP2
ucauuggcauacuccccugga

SEQ ID NO: 1000 - RNA, 21 nt, Artificial Sequence
  siRNA antisense strand against MASP2
gucauuggcauacuccccugg

SEQ ID NO: 1001 - RNA, 21 nt, Artificial Sequence
  siRNA antisense strand against MASP2
ggucauuggcauacuccccug

SEQ ID NO: 1002 - RNA, 21 nt, Artificial Sequence
  siRNA antisense strand against MASP2
uggucauuggcauacuccccu

SEQ ID NO: 1003 - RNA, 21 nt, Artificial Sequence
  siRNA antisense strand against MASP2
cuggucauuggcauacucccc

SEQ ID NO: 1004 - RNA, 21 nt, Artificial Sequence
  siRNA antisense strand against MASP2
ccuggucauuggcauacuccc

SEQ ID NO: 1005 - RNA, 21 nt, Artificial Sequence
  siRNA antisense strand against MASP2
gccgcuccuggucauuggcau

SEQ ID NO: 1006 - RNA, 21 nt, Artificial Sequence
  siRNA antisense strand against MASP2
cgccgcuccuggucauuggca

SEQ ID NO: 1007 - RNA, 21 nt, Artificial Sequence
  siRNA antisense strand against MASP2
gcgccgcuccuggucauuggc

SEQ ID NO: 1008 - RNA, 21 nt, Artificial Sequence
  siRNA antisense strand against MASP2
cagcgccgcuccuggucauug

SEQ ID NO: 1009 - RNA, 21 nt, Artificial Sequence
  siRNA antisense strand against MASP2
guccagcgccgcuccugguca

SEQ ID NO: 1010 - RNA, 21 nt, Artificial Sequence
  siRNA antisense strand against MASP2
caggguccagcgccgcuccug

SEQ ID NO: 1011 - RNA, 21 nt, Artificial Sequence
  siRNA antisense strand against MASP2
ucaggguccagcgccgcuccu

SEQ ID NO: 1012 - RNA, 21 nt, Artificial Sequence
  siRNA antisense strand against MASP2
gucaggguccagcgccgcucc

SEQ ID NO: 1013 - RNA, 21 nt, Artificial Sequence
  siRNA antisense strand against MASP2
agucaggguccagcgccgcuc

SEQ ID NO: 1014 - RNA, 21 nt, Artificial Sequence
  siRNA antisense strand against MASP2
cagucaggguccagcgccgcu

SEQ ID NO: 1015 - RNA, 21 nt, Artificial Sequence
  siRNA antisense strand against MASP2
gcagucaggguccagcgccgc

SEQ ID NO: 1016 - RNA, 21 nt, Artificial Sequence
  siRNA antisense strand against MASP2
ugcagucaggguccagcgccg

SEQ ID NO: 1017 - RNA, 21 nt, Artificial Sequence
  siRNA antisense strand against MASP2
gugcagucaggguccagcgcc

SEQ ID NO: 1018 - RNA, 21 nt, Artificial Sequence
  siRNA antisense strand against MASP2
ggugcagucaggguccagcgc

SEQ ID NO: 1019 - RNA, 21 nt, Artificial Sequence
  siRNA antisense strand against MASP2
gggggugcagucaggguccag

SEQ ID NO: 1020 - RNA, 21 nt, Artificial Sequence
  siRNA antisense strand against MASP2
ggggggugcagucagggucca

SEQ ID NO: 1021 - RNA, 21 nt, Artificial Sequence
  siRNA antisense strand against MASP2
guagccggggggugcagucag

SEQ ID NO: 1022 - RNA, 21 nt, Artificial Sequence
  siRNA antisense strand against MASP2
aggcgcaggcgguagccgggg

SEQ ID NO: 1023 - RNA, 21 nt, Artificial Sequence
  siRNA antisense strand against MASP2
agaggcgcaggcgguagccgg

SEQ ID NO: 1024 - RNA, 21 nt, Artificial Sequence
  siRNA antisense strand against MASP2
uagaggcgcaggcgguagccg

SEQ ID NO: 1025 - RNA, 21 nt, Artificial Sequence
  siRNA antisense strand against MASP2
guagaggcgcaggcgguagcc

SEQ ID NO: 1026 - RNA, 21 nt, Artificial Sequence
  siRNA antisense strand against MASP2
aaguagaggcgcaggcgguag

SEQ ID NO: 1027 - RNA, 21 nt, Artificial Sequence
  siRNA antisense strand against MASP2
gaaguagaggcgcaggcggua

SEQ ID NO: 1028 - RNA, 21 nt, Artificial Sequence
  siRNA antisense strand against MASP2
ugaaguagaggcgcaggcggu

SEQ ID NO: 1029 - RNA, 21 nt, Artificial Sequence
  siRNA antisense strand against MASP2
gugaaguagaggcgcaggcgg

SEQ ID NO: 1030 - RNA, 21 nt, Artificial Sequence
  siRNA antisense strand against MASP2
ggugaaguagaggcgcaggcg

SEQ ID NO: 1031 - RNA, 21 nt, Artificial Sequence
  siRNA antisense strand against MASP2
gggugaaguagaggcgcaggc

SEQ ID NO: 1032 - RNA, 21 nt, Artificial Sequence
  siRNA antisense strand against MASP2
ugggugaaguagaggcgcagg

SEQ ID NO: 1033 - RNA, 21 nt, Artificial Sequence
  siRNA antisense strand against MASP2
agugggugaaguagaggcgca

SEQ ID NO: 1034 - RNA, 21 nt, Artificial Sequence
  siRNA antisense strand against MASP2
aagugggugaaguagaggcgc

SEQ ID NO: 1035 - RNA, 21 nt, Artificial Sequence
  siRNA antisense strand against MASP2
gaagugggugaaguagaggcg

SEQ ID NO: 1036 - RNA, 21 nt, Artificial Sequence
  siRNA antisense strand against MASP2
cgaagugggugaaguagaggc

SEQ ID NO: 1037 - RNA, 21 nt, Artificial Sequence
  siRNA antisense strand against MASP2
ucgaagugggugaaguagagg

SEQ ID NO: 1038 - RNA, 21 nt, Artificial Sequence
  siRNA antisense strand against MASP2
gucgaagugggugaaguagag

SEQ ID NO: 1039 - RNA, 21 nt, Artificial Sequence
  siRNA antisense strand against MASP2
aggucgaagugggugaaguag

SEQ ID NO: 1040 - RNA, 21 nt, Artificial Sequence
  siRNA antisense strand against MASP2
caggucgaagugggugaagua

SEQ ID NO: 1041 - RNA, 21 nt, Artificial Sequence
  siRNA antisense strand against MASP2
uccaggucgaagugggugaag

SEQ ID NO: 1042 - RNA, 21 nt, Artificial Sequence
  siRNA antisense strand against MASP2
agcuccaggucgaagugggug

SEQ ID NO: 1043 - RNA, 21 nt, Artificial Sequence
  siRNA antisense strand against MASP2
agagcuccaggucgaaguggg

SEQ ID NO: 1044 - RNA, 21 nt, Artificial Sequence
  siRNA antisense strand against MASP2
gugggagagcuccaggucgaa

SEQ ID NO: 1045 - RNA, 21 nt, Artificial Sequence
  siRNA antisense strand against MASP2
gaggugggagagcuccagguc

SEQ ID NO: 1046 - RNA, 21 nt, Artificial Sequence
  siRNA antisense strand against MASP2
gcagaggugggagagcuccag

SEQ ID NO: 1047 - RNA, 21 nt, Artificial Sequence
  siRNA antisense strand against MASP2
cgcagaggugggagagcucca

SEQ ID NO: 1048 - RNA, 21 nt, Artificial Sequence
  siRNA antisense strand against MASP2
ucgcagaggugggagagcucc

SEQ ID NO: 1049 - RNA, 21 nt, Artificial Sequence
  siRNA antisense strand against MASP2
uacucgcagaggugggagagc

SEQ ID NO: 1050 - RNA, 21 nt, Artificial Sequence
  siRNA antisense strand against MASP2
guacucgcagaggugggagag

SEQ ID NO: 1051 - RNA, 21 nt, Artificial Sequence
  siRNA antisense strand against MASP2
ucguacucgcagaggugggag

SEQ ID NO: 1052 - RNA, 21 nt, Artificial Sequence
  siRNA antisense strand against MASP2
gucguacucgcagagguggga

SEQ ID NO: 1053 - RNA, 21 nt, Artificial Sequence
  siRNA antisense strand against MASP2
aagucguacucgcagaggugg

SEQ ID NO: 1054 - RNA, 21 nt, Artificial Sequence
  siRNA antisense strand against MASP2
gaagucguacucgcagaggug

SEQ ID NO: 1055 - RNA, 21 nt, Artificial Sequence
  siRNA antisense strand against MASP2
acgaagucguacucgcagagg

SEQ ID NO: 1056 - RNA, 21 nt, Artificial Sequence
  siRNA antisense strand against MASP2
gacgaagucguacucgcagag

SEQ ID NO: 1057 - RNA, 21 nt, Artificial Sequence
  siRNA antisense strand against MASP2
uugacgaagucguacucgcag

SEQ ID NO: 1058 - RNA, 21 nt, Artificial Sequence
  siRNA antisense strand against MASP2
cuugacgaagucguacucgca

SEQ ID NO: 1059 - RNA, 21 nt, Artificial Sequence
  siRNA antisense strand against MASP2
gcuugacgaagucguacucgc

SEQ ID NO: 1060 - RNA, 21 nt, Artificial Sequence
  siRNA antisense strand against MASP2
agcuugacgaagucguacucg

SEQ ID NO: 1061 - RNA, 21 nt, Artificial Sequence
  siRNA antisense strand against MASP2
cagcuugacgaagucguacuc

SEQ ID NO: 1062 - RNA, 21 nt, Artificial Sequence
  siRNA antisense strand against MASP2
cucagcuugacgaagucguac

SEQ ID NO: 1063 - RNA, 21 nt, Artificial Sequence
  siRNA antisense strand against MASP2
gcucagcuugacgaagucgua

SEQ ID NO: 1064 - RNA, 21 nt, Artificial Sequence
  siRNA antisense strand against MASP2
agcucagcuugacgaagucgu

SEQ ID NO: 1065 - RNA, 21 nt, Artificial Sequence
  siRNA antisense strand against MASP2
ccccgagcucagcuugacgaa

SEQ ID NO: 1066 - RNA, 21 nt, Artificial Sequence
  siRNA antisense strand against MASP2
agcguggccagcaccuuggcc

SEQ ID NO: 1067 - RNA, 21 nt, Artificial Sequence
  siRNA antisense strand against MASP2
ugcccgcacagcguggccagc

SEQ ID NO: 1068 - RNA, 21 nt, Artificial Sequence
  siRNA antisense strand against MASP2
uccugcccgcacagcguggcc

SEQ ID NO: 1069 - RNA, 21 nt, Artificial Sequence
  siRNA antisense strand against MASP2
ugugcucuccugcccgcacag

SEQ ID NO: 1070 - RNA, 21 nt, Artificial Sequence
  siRNA antisense strand against MASP2
gugucugugcucuccugcccg

SEQ ID NO: 1071 - RNA, 21 nt, Artificial Sequence
  siRNA antisense strand against MASP2
cgugucugugcucuccugccc

SEQ ID NO: 1072 - RNA, 21 nt, Artificial Sequence
  siRNA antisense strand against MASP2
uccgugucugugcucuccugc

SEQ ID NO: 1073 - RNA, 21 nt, Artificial Sequence
  siRNA antisense strand against MASP2
cuccgugucugugcucuccug

SEQ ID NO: 1074 - RNA, 21 nt, Artificial Sequence
  siRNA antisense strand against MASP2
gcuccgugucugugcucuccu

SEQ ID NO: 1075 - RNA, 21 nt, Artificial Sequence
  siRNA antisense strand against MASP2
cgcuccgugucugugcucucc

SEQ ID NO: 1076 - RNA, 21 nt, Artificial Sequence
  siRNA antisense strand against MASP2
uguccuugccaggggcccgcu

SEQ ID NO: 1077 - RNA, 21 nt, Artificial Sequence
  siRNA antisense strand against MASP2
aaguguccuugccaggggccc

SEQ ID NO: 1078 - RNA, 21 nt, Artificial Sequence
  siRNA antisense strand against MASP2
uagaaaguguccuugccaggg

SEQ ID NO: 1079 - RNA, 21 nt, Artificial Sequence
  siRNA antisense strand against MASP2
aguagaaaguguccuugccag

SEQ ID NO: 1080 - RNA, 21 nt, Artificial Sequence
  siRNA antisense strand against MASP2
gaguagaaaguguccuugcca

SEQ ID NO: 1081 - RNA, 21 nt, Artificial Sequence
  siRNA antisense strand against MASP2
agcgaguagaaaguguccuug

SEQ ID NO: 1082 - RNA, 21 nt, Artificial Sequence
  siRNA antisense strand against MASP2
cagcgaguagaaaguguccuu

SEQ ID NO: 1083 - RNA, 21 nt, Artificial Sequence
  siRNA antisense strand against MASP2
ccagcgaguagaaaguguccu

SEQ ID NO: 1084 - RNA, 21 nt, Artificial Sequence
  siRNA antisense strand against MASP2
cccagcgaguagaaagugucc

SEQ ID NO: 1085 - RNA, 21 nt, Artificial Sequence
  siRNA antisense strand against MASP2
agcccagcgaguagaaagugu

SEQ ID NO: 1086 - RNA, 21 nt, Artificial Sequence
  siRNA antisense strand against MASP2
gagcccagcgaguagaaagug

SEQ ID NO: 1087 - RNA, 21 nt, Artificial Sequence
  siRNA antisense strand against MASP2
caggcuggagcccagcgagua

SEQ ID NO: 1088 - RNA, 21 nt, Artificial Sequence
  siRNA antisense strand against MASP2
uccaggcuggagcccagcgag

SEQ ID NO: 1089 - RNA, 21 nt, Artificial Sequence
  siRNA antisense strand against MASP2
uguccaggcuggagcccagcg

SEQ ID NO: 1090 - RNA, 21 nt, Artificial Sequence
  siRNA antisense strand against MASP2
auguccaggcuggagcccagc

SEQ ID NO: 1091 - RNA, 21 nt, Artificial Sequence
  siRNA antisense strand against MASP2
aauguccaggcuggagcccag

SEQ ID NO: 1092 - RNA, 21 nt, Artificial Sequence
  siRNA antisense strand against MASP2
uaauguccaggcuggagccca

SEQ ID NO: 1093 - RNA, 21 nt, Artificial Sequence
  siRNA antisense strand against MASP2
guaauguccaggcuggagccc

SEQ ID NO: 1094 - RNA, 21 nt, Artificial Sequence
  siRNA antisense strand against MASP2
gguaauguccaggcuggagcc

SEQ ID NO: 1095 - RNA, 21 nt, Artificial Sequence
  siRNA antisense strand against MASP2
aagguaauguccaggcuggag

SEQ ID NO: 1096 - RNA, 21 nt, Artificial Sequence
  siRNA antisense strand against MASP2
gaagguaauguccaggcugga

SEQ ID NO: 1097 - RNA, 21 nt, Artificial Sequence
  siRNA antisense strand against MASP2
cggaagguaauguccaggcug

SEQ ID NO: 1098 - RNA, 21 nt, Artificial Sequence
  siRNA antisense strand against MASP2
gcggaagguaauguccaggcu

SEQ ID NO: 1099 - RNA, 21 nt, Artificial Sequence
  siRNA antisense strand against MASP2
agcggaagguaauguccaggc

SEQ ID NO: 1100 - RNA, 21 nt, Artificial Sequence
  siRNA antisense strand against MASP2
ggagcggaagguaauguccag

SEQ ID NO: 1101 - RNA, 21 nt, Artificial Sequence
  siRNA antisense strand against MASP2
cggagcggaagguaaugucca

SEQ ID NO: 1102 - RNA, 21 nt, Artificial Sequence
  siRNA antisense strand against MASP2
ucggagcggaagguaaugucc

SEQ ID NO: 1103 - RNA, 21 nt, Artificial Sequence
  siRNA antisense strand against MASP2
gucggagcggaagguaauguc

SEQ ID NO: 1104 - RNA, 21 nt, Artificial Sequence
  siRNA antisense strand against MASP2
uagucggagcggaagguaaug

SEQ ID NO: 1105 - RNA, 21 nt, Artificial Sequence
  siRNA antisense strand against MASP2
aguagucggagcggaagguaa

SEQ ID NO: 1106 - RNA, 21 nt, Artificial Sequence
  siRNA antisense strand against MASP2
gaguagucggagcggaaggua

SEQ ID NO: 1107 - RNA, 21 nt, Artificial Sequence
  siRNA antisense strand against MASP2
ggaguagucggagcggaaggu

SEQ ID NO: 1108 - RNA, 21 nt, Artificial Sequence
  siRNA antisense strand against MASP2
ucucguuggaguagucggagc

SEQ ID NO: 1109 - RNA, 21 nt, Artificial Sequence
  siRNA antisense strand against MASP2
uucucguuggaguagucggag

SEQ ID NO: 1110 - RNA, 21 nt, Artificial Sequence
  siRNA antisense strand against MASP2
cuucucguuggaguagucgga

SEQ ID NO: 1111 - RNA, 21 nt, Artificial Sequence
  siRNA antisense strand against MASP2
aacggcuucucguuggaguag

SEQ ID NO: 1112 - RNA, 21 nt, Artificial Sequence
  siRNA antisense strand against MASP2
gaacggcuucucguuggagua

SEQ ID NO: 1113 - RNA, 21 nt, Artificial Sequence
  siRNA antisense strand against MASP2
cccgugaacggcuucucguug

SEQ ID NO: 1114 - RNA, 21 nt, Artificial Sequence
  siRNA antisense strand against MASP2
ccccgugaacggcuucucguu

SEQ ID NO: 1115 - RNA, 21 nt, Artificial Sequence
  siRNA antisense strand against MASP2
accccgugaacggcuucucgu

SEQ ID NO: 1116 - RNA, 21 nt, Artificial Sequence
  siRNA antisense strand against MASP2
gaaccccgugaacggcuucuc

SEQ ID NO: 1117 - RNA, 21 nt, Artificial Sequence
  siRNA antisense strand against MASP2
ucgaaccccgugaacggcuuc

SEQ ID NO: 1118 - RNA, 21 nt, Artificial Sequence
  siRNA antisense strand against MASP2
ccucgaaccccgugaacggcu

SEQ ID NO: 1119 - RNA, 21 nt, Artificial Sequence
  siRNA antisense strand against MASP2
gccucgaaccccgugaacggc

SEQ ID NO: 1120 - RNA, 21 nt, Artificial Sequence
  siRNA antisense strand against MASP2
aaggccucgaaccccgugaac

SEQ ID NO: 1121 - RNA, 21 nt, Artificial Sequence
  siRNA antisense strand against MASP2
auagaaggccucgaaccccgu

SEQ ID NO: 1122 - RNA, 21 nt, Artificial Sequence
  siRNA antisense strand against MASP2
cauagaaggccucgaaccccg

SEQ ID NO: 1123 - RNA, 21 nt, Artificial Sequence
  siRNA antisense strand against MASP2
gcauagaaggccucgaacccc

SEQ ID NO: 1124 - RNA, 21 nt, Artificial Sequence
  siRNA antisense strand against MASP2
ugcauagaaggccucgaaccc

SEQ ID NO: 1125 - RNA, 21 nt, Artificial Sequence
  siRNA antisense strand against MASP2
cucggcugcauagaaggccuc

SEQ ID NO: 1126 - RNA, 21 nt, Artificial Sequence
  siRNA antisense strand against MASP2
auguccucggcugcauagaag

SEQ ID NO: 1127 - RNA, 21 nt, Artificial Sequence
  siRNA antisense strand against MASP2
aauguccucggcugcauagaa

SEQ ID NO: 1128 - RNA, 21 nt, Artificial Sequence
  siRNA antisense strand against MASP2
caauguccucggcugcauaga

SEQ ID NO: 1129 - RNA, 21 nt, Artificial Sequence
  siRNA antisense strand against MASP2
ucaauguccucggcugcauag

SEQ ID NO: 1130 - RNA, 21 nt, Artificial Sequence
  siRNA antisense strand against MASP2
cgucaauguccucggcugcau

SEQ ID NO: 1131 - RNA, 21 nt, Artificial Sequence
  siRNA antisense strand against MASP2
ucgucaauguccucggcugca

SEQ ID NO: 1132 - RNA, 21 nt, Artificial Sequence
  siRNA antisense strand against MASP2
cucgucaauguccucggcugc

SEQ ID NO: 1133 - RNA, 21 nt, Artificial Sequence
  siRNA antisense strand against MASP2
acucgucaauguccucggcug

SEQ ID NO: 1134 - RNA, 21 nt, Artificial Sequence
  siRNA antisense strand against MASP2
cacucgucaauguccucggcu

SEQ ID NO: 1135 - RNA, 21 nt, Artificial Sequence
  siRNA antisense strand against MASP2
gcacucgucaauguccucggc

SEQ ID NO: 1136 - RNA, 21 nt, Artificial Sequence
  siRNA antisense strand against MASP2
cccggggccaccuggcacucg

SEQ ID NO: 1137 - RNA, 21 nt, Artificial Sequence
  siRNA antisense strand against MASP2
cgcaggugggcgccucucccg

SEQ ID NO: 1138 - RNA, 21 nt, Artificial Sequence
  siRNA antisense strand against MASP2
ucgcaggugggcgccucuccc

SEQ ID NO: 1139 - RNA, 21 nt, Artificial Sequence
  siRNA antisense strand against MASP2
agugguggucgcaggugggcg

SEQ ID NO: 1140 - RNA, 21 nt, Artificial Sequence
  siRNA antisense strand against MASP2
uuguggcagugguggucgcag

SEQ ID NO: 1141 - RNA, 21 nt, Artificial Sequence
  siRNA antisense strand against MASP2
guuguggcagugguggucgca

SEQ ID NO: 1142 - RNA, 21 nt, Artificial Sequence
  siRNA antisense strand against MASP2
ugguuguggcagugguggucg

SEQ ID NO: 1143 - RNA, 21 nt, Artificial Sequence
  siRNA antisense strand against MASP2
gugguuguggcaguggugguc

SEQ ID NO: 1144 - RNA, 21 nt, Artificial Sequence
  siRNA antisense strand against MASP2
aggugguuguggcaguggugg

SEQ ID NO: 1145 - RNA, 21 nt, Artificial Sequence
  siRNA antisense strand against MASP2
caggugguuguggcaguggug

SEQ ID NO: 1146 - RNA, 21 nt, Artificial Sequence
  siRNA antisense strand against MASP2
cccaggugguuguggcagugg

SEQ ID NO: 1147 - RNA, 21 nt, Artificial Sequence
  siRNA antisense strand against MASP2
ccgcccaggugguuguggcag

SEQ ID NO: 1148 - RNA, 21 nt, Artificial Sequence
  siRNA antisense strand against MASP2
aaccgcccaggugguuguggc

SEQ ID NO: 1149 - RNA, 21 nt, Artificial Sequence
  siRNA antisense strand against MASP2
aaaccgcccaggugguugugg

SEQ ID NO: 1150 - RNA, 21 nt, Artificial Sequence
  siRNA antisense strand against MASP2
gaaaccgcccaggugguugug

SEQ ID NO: 1151 - RNA, 21 nt, Artificial Sequence
  siRNA antisense strand against MASP2
guagaaaccgcccaggugguu

SEQ ID NO: 1152 - RNA, 21 nt, Artificial Sequence
  siRNA antisense strand against MASP2
ggagcaguagaaaccgcccag

SEQ ID NO: 1153 - RNA, 21 nt, Artificial Sequence
  siRNA antisense strand against MASP2
aggagcaguagaaaccgccca

SEQ ID NO: 1154 - RNA, 21 nt, Artificial Sequence
  siRNA antisense strand against MASP2
caggagcaguagaaaccgccc

SEQ ID NO: 1155 - RNA, 21 nt, Artificial Sequence
  siRNA antisense strand against MASP2
gcaggagcaguagaaaccgcc

SEQ ID NO: 1156 - RNA, 21 nt, Artificial Sequence
  siRNA antisense strand against MASP2
cggcaggagcaguagaaaccg

SEQ ID NO: 1157 - RNA, 21 nt, Artificial Sequence
  siRNA antisense strand against MASP2
uagccugcgcggcaggagcag

SEQ ID NO: 1158 - RNA, 21 nt, Artificial Sequence
  siRNA antisense strand against MASP2
gacguagccugcgcggcagga

SEQ ID NO: 1159 - RNA, 21 nt, Artificial Sequence
  siRNA antisense strand against MASP2
uacggugcaggacguagccug

SEQ ID NO: 1160 - RNA, 21 nt, Artificial Sequence
  siRNA antisense strand against MASP2
uuacggugcaggacguagccu

SEQ ID NO: 1161 - RNA, 21 nt, Artificial Sequence
  siRNA antisense strand against MASP2
guuacggugcaggacguagcc

SEQ ID NO: 1162 - RNA, 21 nt, Artificial Sequence
  siRNA antisense strand against MASP2
uuguuacggugcaggacguag

SEQ ID NO: 1163 - RNA, 21 nt, Artificial Sequence
  siRNA antisense strand against MASP2
cuuguuacggugcaggacgua

SEQ ID NO: 1164 - RNA, 21 nt, Artificial Sequence
  siRNA antisense strand against MASP2
ugcgcuuguuacggugcagga

SEQ ID NO: 1165 - RNA, 21 nt, Artificial Sequence
  siRNA antisense strand against MASP2
ggugcgcuuguuacggugcag

SEQ ID NO: 1166 - RNA, 21 nt, Artificial Sequence
  siRNA antisense strand against MASP2
aggugcgcuuguuacggugca

SEQ ID NO: 1167 - RNA, 21 nt, Artificial Sequence
  siRNA antisense strand against MASP2
gcaggugcgcuuguuacggug

SEQ ID NO: 1168 - RNA, 21 nt, Artificial Sequence
  siRNA antisense strand against MASP2
agcaggugcgcuuguuacggu

SEQ ID NO: 1169 - RNA, 21 nt, Artificial Sequence
  siRNA antisense strand against MASP2
ggcugagcaggugcgcuuguu

SEQ ID NO: 1170 - RNA, 21 nt, Artificial Sequence
  siRNA antisense strand against MASP2
cucugggugaagaccuggccg

SEQ ID NO: 1171 - RNA, 21 nt, Artificial Sequence
  siRNA antisense strand against MASP2
gaccucugggugaagaccugg

SEQ ID NO: 1172 - RNA, 21 nt, Artificial Sequence
  siRNA antisense strand against MASP2
gcuccccagaccucuggguga

SEQ ID NO: 1173 - RNA, 21 nt, Artificial Sequence
  siRNA antisense strand against MASP2
agcuccccagaccucugggug

SEQ ID NO: 1174 - RNA, 21 nt, Artificial Sequence
  siRNA antisense strand against MASP2
gagcuccccagaccucugggu

SEQ ID NO: 1175 - RNA, 21 nt, Artificial Sequence
  siRNA antisense strand against MASP2
ugagcuccccagaccucuggg

SEQ ID NO: 1176 - RNA, 21 nt, Artificial Sequence
  siRNA antisense strand against MASP2
cugagcuccccagaccucugg

SEQ ID NO: 1177 - RNA, 21 nt, Artificial Sequence
  siRNA antisense strand against MASP2
cugcugagcuccccagaccuc

SEQ ID NO: 1178 - RNA, 21 nt, Artificial Sequence
  siRNA antisense strand against MASP2
agggcugcugagcuccccaga

SEQ ID NO: 1179 - RNA, 21 nt, Artificial Sequence
  siRNA antisense strand against MASP2
cagggcugcugagcuccccag

SEQ ID NO: 1180 - RNA, 21 nt, Artificial Sequence
  siRNA antisense strand against MASP2
uucagggcugcugagcucccc

SEQ ID NO: 1181 - RNA, 21 nt, Artificial Sequence
  siRNA antisense strand against MASP2
auucagggcugcugagcuccc

SEQ ID NO: 1182 - RNA, 21 nt, Artificial Sequence
  siRNA antisense strand against MASP2
guauucagggcugcugagcuc

SEQ ID NO: 1183 - RNA, 21 nt, Artificial Sequence
  siRNA antisense strand against MASP2
uggguauucagggcugcugag

SEQ ID NO: 1184 - RNA, 21 nt, Artificial Sequence
  siRNA antisense strand against MASP2
guggguauucagggcugcuga

SEQ ID NO: 1185 - RNA, 21 nt, Artificial Sequence
  siRNA antisense strand against MASP2
cguggguauucagggcugcug

SEQ ID NO: 1186 - RNA, 21 nt, Artificial Sequence
  siRNA antisense strand against MASP2
uacggccguggguauucaggg

SEQ ID NO: 1187 - RNA, 21 nt, Artificial Sequence
  siRNA antisense strand against MASP2
uuugggauacggccgugggua

SEQ ID NO: 1188 - RNA, 21 nt, Artificial Sequence
  siRNA antisense strand against MASP2
guuugggauacggccgugggu

SEQ ID NO: 1189 - RNA, 21 nt, Artificial Sequence
  siRNA antisense strand against MASP2
gagaguuugggauacggccgu

SEQ ID NO: 1190 - RNA, 21 nt, Artificial Sequence
  siRNA antisense strand against MASP2
ggagaguuugggauacggccg

SEQ ID NO: 1191 - RNA, 21 nt, Artificial Sequence
  siRNA antisense strand against MASP2
cuggagaguuugggauacggc

SEQ ID NO: 1192 - RNA, 21 nt, Artificial Sequence
  siRNA antisense strand against MASP2
acuggagaguuugggauacgg

SEQ ID NO: 1193 - RNA, 21 nt, Artificial Sequence
  siRNA antisense strand against MASP2
aacuggagaguuugggauacg

SEQ ID NO: 1194 - RNA, 21 nt, Artificial Sequence
  siRNA antisense strand against MASP2
ugcaacuggagaguuugggau

SEQ ID NO: 1195 - RNA, 21 nt, Artificial Sequence
  siRNA antisense strand against MASP2
agugcaacuggagaguuuggg

SEQ ID NO: 1196 - RNA, 21 nt, Artificial Sequence
  siRNA antisense strand against MASP2
aagugcaacuggagaguuugg

SEQ ID NO: 1197 - RNA, 21 nt, Artificial Sequence
  siRNA antisense strand against MASP2
uaagugcaacuggagaguuug

SEQ ID NO: 1198 - RNA, 21 nt, Artificial Sequence
  siRNA antisense strand against MASP2
guaagugcaacuggagaguuu

SEQ ID NO: 1199 - RNA, 21 nt, Artificial Sequence
  siRNA antisense strand against MASP2
uguaagugcaacuggagaguu

SEQ ID NO: 1200 - RNA, 21 nt, Artificial Sequence
  siRNA antisense strand against MASP2
ugcuguaagugcaacuggaga

SEQ ID NO: 1201 - RNA, 21 nt, Artificial Sequence
  siRNA antisense strand against MASP2
augcuguaagugcaacuggag

SEQ ID NO: 1202 - RNA, 21 nt, Artificial Sequence
  siRNA antisense strand against MASP2
gaugcuguaagugcaacugga

SEQ ID NO: 1203 - RNA, 21 nt, Artificial Sequence
  siRNA antisense strand against MASP2
ugaugcuguaagugcaacugg

SEQ ID NO: 1204 - RNA, 21 nt, Artificial Sequence
  siRNA antisense strand against MASP2
cugaugcuguaagugcaacug

SEQ ID NO: 1205 - RNA, 21 nt, Artificial Sequence
  siRNA antisense strand against MASP2
caggcugaugcuguaagugca

SEQ ID NO: 1206 - RNA, 21 nt, Artificial Sequence
  siRNA antisense strand against MASP2
uccaggcugaugcuguaagug

SEQ ID NO: 1207 - RNA, 21 nt, Artificial Sequence
  siRNA antisense strand against MASP2
cccuccuccaggcugaugcug

SEQ ID NO: 1208 - RNA, 21 nt, Artificial Sequence
  siRNA antisense strand against MASP2
aaccccuccuccaggcugaug

SEQ ID NO: 1209 - RNA, 21 nt, Artificial Sequence
  siRNA antisense strand against MASP2
acugaaccccuccuccaggcu

SEQ ID NO: 1210 - RNA, 21 nt, Artificial Sequence
  siRNA antisense strand against MASP2
cacugaaccccuccuccaggc

SEQ ID NO: 1211 - RNA, 21 nt, Artificial Sequence
  siRNA antisense strand against MASP2
acacugaaccccuccuccagg

SEQ ID NO: 1212 - RNA, 21 nt, Artificial Sequence
  siRNA antisense strand against MASP2
gacacugaaccccuccuccag

SEQ ID NO: 1213 - RNA, 21 nt, Artificial Sequence
  siRNA antisense strand against MASP2
ugacacugaaccccuccucca

SEQ ID NO: 1214 - RNA, 21 nt, Artificial Sequence
  siRNA antisense strand against MASP2
augacacugaaccccuccucc

SEQ ID NO: 1215 - RNA, 21 nt, Artificial Sequence
  siRNA antisense strand against MASP2
aaugacacugaaccccuccuc

SEQ ID NO: 1216 - RNA, 21 nt, Artificial Sequence
  siRNA antisense strand against MASP2
gaaugacacugaaccccuccu

SEQ ID NO: 1217 - RNA, 21 nt, Artificial Sequence
  siRNA antisense strand against MASP2
cagaaugacacugaaccccuc

SEQ ID NO: 1218 - RNA, 21 nt, Artificial Sequence
  siRNA antisense strand against MASP2
uccagaaugacacugaacccc

SEQ ID NO: 1219 - RNA, 21 nt, Artificial Sequence
  siRNA antisense strand against MASP2
guccagaaugacacugaaccc

SEQ ID NO: 1220 - RNA, 21 nt, Artificial Sequence
  siRNA antisense strand against MASP2
aaguccagaaugacacugaac

SEQ ID NO: 1221 - RNA, 21 nt, Artificial Sequence
  siRNA antisense strand against MASP2
aaaguccagaaugacacugaa

SEQ ID NO: 1222 - RNA, 21 nt, Artificial Sequence
  siRNA antisense strand against MASP2
caaaguccagaaugacacuga

SEQ ID NO: 1223 - RNA, 21 nt, Artificial Sequence
  siRNA antisense strand against MASP2
acaaaguccagaaugacacug

SEQ ID NO: 1224 - RNA, 21 nt, Artificial Sequence
  siRNA antisense strand against MASP2
cgaaggacuccacaaagucca

SEQ ID NO: 1225 - RNA, 21 nt, Artificial Sequence
  siRNA antisense strand against MASP2
ucgaaggacuccacaaagucc

SEQ ID NO: 1226 - RNA, 21 nt, Artificial Sequence
  siRNA antisense strand against MASP2
acaucgaaggacuccacaaag

SEQ ID NO: 1227 - RNA, 21 nt, Artificial Sequence
  siRNA antisense strand against MASP2
cacaucgaaggacuccacaaa

SEQ ID NO: 1228 - RNA, 21 nt, Artificial Sequence
  siRNA antisense strand against MASP2
uccacaucgaaggacuccaca

SEQ ID NO: 1229 - RNA, 21 nt, Artificial Sequence
  siRNA antisense strand against MASP2
ucuccacaucgaaggacucca

SEQ ID NO: 1230 - RNA, 21 nt, Artificial Sequence
  siRNA antisense strand against MASP2
gucuccacaucgaaggacucc

SEQ ID NO: 1231 - RNA, 21 nt, Artificial Sequence
  siRNA antisense strand against MASP2
ugucuccacaucgaaggacuc

SEQ ID NO: 1232 - RNA, 21 nt, Artificial Sequence
  siRNA antisense strand against MASP2
ugugucuccacaucgaaggac

SEQ ID NO: 1233 - RNA, 21 nt, Artificial Sequence
  siRNA antisense strand against MASP2
gugugucuccacaucgaagga

SEQ ID NO: 1234 - RNA, 21 nt, Artificial Sequence
  siRNA antisense strand against MASP2
ucagggugugucuccacaucg

SEQ ID NO: 1235 - RNA, 21 nt, Artificial Sequence
  siRNA antisense strand against MASP2
uucagggugugucuccacauc

SEQ ID NO: 1236 - RNA, 21 nt, Artificial Sequence
  siRNA antisense strand against MASP2
uuucagggugugucuccacau

SEQ ID NO: 1237 - RNA, 21 nt, Artificial Sequence
  siRNA antisense strand against MASP2
gguuucagggugugucuccac

SEQ ID NO: 1238 - RNA, 21 nt, Artificial Sequence
  siRNA antisense strand against MASP2
aggguuucagggugugucucc

SEQ ID NO: 1239 - RNA, 21 nt, Artificial Sequence
  siRNA antisense strand against MASP2
acaggguuucagggugugucu

SEQ ID NO: 1240 - RNA, 21 nt, Artificial Sequence
  siRNA antisense strand against MASP2
cacaggguuucaggguguguc

SEQ ID NO: 1241 - RNA, 21 nt, Artificial Sequence
  siRNA antisense strand against MASP2
gacacaggguuucagggugug

SEQ ID NO: 1242 - RNA, 21 nt, Artificial Sequence
  siRNA antisense strand against MASP2
ggacacaggguuucagggugu

SEQ ID NO: 1243 - RNA, 21 nt, Artificial Sequence
  siRNA antisense strand against MASP2
gggacacaggguuucagggug

SEQ ID NO: 1244 - RNA, 21 nt, Artificial Sequence
  siRNA antisense strand against MASP2
agggacacaggguuucagggu

SEQ ID NO: 1245 - RNA, 21 nt, Artificial Sequence
  siRNA antisense strand against MASP2
uagggacacaggguuucaggg

SEQ ID NO: 1246 - RNA, 21 nt, Artificial Sequence
  siRNA antisense strand against MASP2
cguagggacacaggguuucag

SEQ ID NO: 1247 - RNA, 21 nt, Artificial Sequence
  siRNA antisense strand against MASP2
agucguagggacacaggguuu

SEQ ID NO: 1248 - RNA, 21 nt, Artificial Sequence
  siRNA antisense strand against MASP2
aagucguagggacacaggguu

SEQ ID NO: 1249 - RNA, 21 nt, Artificial Sequence
  siRNA antisense strand against MASP2
aaagucguagggacacagggu

SEQ ID NO: 1250 - RNA, 21 nt, Artificial Sequence
  siRNA antisense strand against MASP2
gaaagucguagggacacaggg

SEQ ID NO: 1251 - RNA, 21 nt, Artificial Sequence
  siRNA antisense strand against MASP2
agaaagucguagggacacagg

SEQ ID NO: 1252 - RNA, 21 nt, Artificial Sequence
  siRNA antisense strand against MASP2
gagaaagucguagggacacag

SEQ ID NO: 1253 - RNA, 21 nt, Artificial Sequence
  siRNA antisense strand against MASP2
ugagaaagucguagggacaca

SEQ ID NO: 1254 - RNA, 21 nt, Artificial Sequence
  siRNA antisense strand against MASP2
uugagaaagucguagggacac

SEQ ID NO: 1255 - RNA, 21 nt, Artificial Sequence
  siRNA antisense strand against MASP2
ucuugagaaagucguagggac

SEQ ID NO: 1256 - RNA, 21 nt, Artificial Sequence
  siRNA antisense strand against MASP2
aaucuugagaaagucguaggg

SEQ ID NO: 1257 - RNA, 21 nt, Artificial Sequence
  siRNA antisense strand against MASP2
ugaaucuugagaaagucguag

SEQ ID NO: 1258 - RNA, 21 nt, Artificial Sequence
  siRNA antisense strand against MASP2
uuugaaucuugagaaagucgu

SEQ ID NO: 1259 - RNA, 21 nt, Artificial Sequence
  siRNA antisense strand against MASP2
guuugaaucuugagaaagucg

SEQ ID NO: 1260 - RNA, 21 nt, Artificial Sequence
  siRNA antisense strand against MASP2
uguuugaaucuugagaaaguc

SEQ ID NO: 1261 - RNA, 21 nt, Artificial Sequence
  siRNA antisense strand against MASP2
ucuguuugaaucuugagaaag

SEQ ID NO: 1262 - RNA, 21 nt, Artificial Sequence
  siRNA antisense strand against MASP2
gucuguuugaaucuugagaaa

SEQ ID NO: 1263 - RNA, 21 nt, Artificial Sequence
  siRNA antisense strand against MASP2
ugucuguuugaaucuugagaa

SEQ ID NO: 1264 - RNA, 21 nt, Artificial Sequence
  siRNA antisense strand against MASP2
cugucuguuugaaucuugaga

SEQ ID NO: 1265 - RNA, 21 nt, Artificial Sequence
  siRNA antisense strand against MASP2
ucugucuguuugaaucuugag

SEQ ID NO: 1266 - RNA, 21 nt, Artificial Sequence
  siRNA antisense strand against MASP2
cucugucuguuugaaucuuga

SEQ ID NO: 1267 - RNA, 21 nt, Artificial Sequence
  siRNA antisense strand against MASP2
ucucugucuguuugaaucuug

SEQ ID NO: 1268 - RNA, 21 nt, Artificial Sequence
  siRNA antisense strand against MASP2
uucucugucuguuugaaucuu

SEQ ID NO: 1269 - RNA, 21 nt, Artificial Sequence
  siRNA antisense strand against MASP2
guucuucucugucuguuugaa

SEQ ID NO: 1270 - RNA, 21 nt, Artificial Sequence
  siRNA antisense strand against MASP2
uguucuucucugucuguuuga

SEQ ID NO: 1271 - RNA, 21 nt, Artificial Sequence
  siRNA antisense strand against MASP2
auguucuucucugucuguuug

SEQ ID NO: 1272 - RNA, 21 nt, Artificial Sequence
  siRNA antisense strand against MASP2
ggccauguucuucucugucug

SEQ ID NO: 1273 - RNA, 21 nt, Artificial Sequence
  siRNA antisense strand against MASP2
ugggccauguucuucucuguc

SEQ ID NO: 1274 - RNA, 21 nt, Artificial Sequence
  siRNA antisense strand against MASP2
gaaugggccauguucuucucu

SEQ ID NO: 1275 - RNA, 21 nt, Artificial Sequence
  siRNA antisense strand against MASP2
ucuucccacagaaugggccau

SEQ ID NO: 1276 - RNA, 21 nt, Artificial Sequence
  siRNA antisense strand against MASP2
gucuucccacagaaugggcca

SEQ ID NO: 1277 - RNA, 21 nt, Artificial Sequence
  siRNA antisense strand against MASP2
ugucuucccacagaaugggcc

SEQ ID NO: 1278 - RNA, 21 nt, Artificial Sequence
  siRNA antisense strand against MASP2
augucuucccacagaaugggc

SEQ ID NO: 1279 - RNA, 21 nt, Artificial Sequence
  siRNA antisense strand against MASP2
aaugucuucccacagaauggg

SEQ ID NO: 1280 - RNA, 21 nt, Artificial Sequence
  siRNA antisense strand against MASP2
aauccuguggggcaaugucuu

SEQ ID NO: 1281 - RNA, 21 nt, Artificial Sequence
  siRNA antisense strand against MASP2
uguuucaauccuguggggcaa

SEQ ID NO: 1282 - RNA, 21 nt, Artificial Sequence
  siRNA antisense strand against MASP2
uuuguuucaauccuguggggc

SEQ ID NO: 1283 - RNA, 21 nt, Artificial Sequence
  siRNA antisense strand against MASP2
uuuuguuucaauccugugggg

SEQ ID NO: 1284 - RNA, 21 nt, Artificial Sequence
  siRNA antisense strand against MASP2
uuuuuguuucaauccuguggg

SEQ ID NO: 1285 - RNA, 21 nt, Artificial Sequence
  siRNA antisense strand against MASP2
cuuuuuguuucaauccugugg

SEQ ID NO: 1286 - RNA, 21 nt, Artificial Sequence
  siRNA antisense strand against MASP2
uugcuuuuuguuucaauccug

SEQ ID NO: 1287 - RNA, 21 nt, Artificial Sequence
  siRNA antisense strand against MASP2
guugcuuuuuguuucaauccu

SEQ ID NO: 1288 - RNA, 21 nt, Artificial Sequence
  siRNA antisense strand against MASP2
uguugcuuuuuguuucaaucc

SEQ ID NO: 1289 - RNA, 21 nt, Artificial Sequence
  siRNA antisense strand against MASP2
ccguguugcuuuuuguuucaa

SEQ ID NO: 1290 - RNA, 21 nt, Artificial Sequence
  siRNA antisense strand against MASP2
accguguugcuuuuuguuuca

SEQ ID NO: 1291 - RNA, 21 nt, Artificial Sequence
  siRNA antisense strand against MASP2
ucaccguguugcuuuuuguuu

SEQ ID NO: 1292 - RNA, 21 nt, Artificial Sequence
  siRNA antisense strand against MASP2
gucaccguguugcuuuuuguu

SEQ ID NO: 1293 - RNA, 21 nt, Artificial Sequence
  siRNA antisense strand against MASP2
uggucaccguguugcuuuuug

SEQ ID NO: 1294 - RNA, 21 nt, Artificial Sequence
  siRNA antisense strand against MASP2
auggucaccguguugcuuuuu

SEQ ID NO: 1295 - RNA, 21 nt, Artificial Sequence
  siRNA antisense strand against MASP2
gauggucaccguguugcuuuu

SEQ ID NO: 1296 - RNA, 21 nt, Artificial Sequence
  siRNA antisense strand against MASP2
aaggugauggucaccguguug

SEQ ID NO: 1297 - RNA, 21 nt, Artificial Sequence
  siRNA antisense strand against MASP2
aaaggugauggucaccguguu

SEQ ID NO: 1298 - RNA, 21 nt, Artificial Sequence
  siRNA antisense strand against MASP2
caaaggugauggucaccgugu

SEQ ID NO: 1299 - RNA, 21 nt, Artificial Sequence
  siRNA antisense strand against MASP2
acaaaggugauggucaccgug

SEQ ID NO: 1300 - RNA, 21 nt, Artificial Sequence
  siRNA antisense strand against MASP2
gacaaaggugauggucaccgu

SEQ ID NO: 1301 - RNA, 21 nt, Artificial Sequence
  siRNA antisense strand against MASP2
ugacaaaggugauggucaccg

SEQ ID NO: 1302 - RNA, 21 nt, Artificial Sequence
  siRNA antisense strand against MASP2
ugugacaaaggugauggucac

SEQ ID NO: 1303 - RNA, 21 nt, Artificial Sequence
  siRNA antisense strand against MASP2
cugugacaaaggugaugguca

SEQ ID NO: 1304 - RNA, 21 nt, Artificial Sequence
  siRNA antisense strand against MASP2
ucugugacaaaggugaugguc

SEQ ID NO: 1305 - RNA, 21 nt, Artificial Sequence
  siRNA antisense strand against MASP2
aucugugacaaaggugauggu

SEQ ID NO: 1306 - RNA, 21 nt, Artificial Sequence
  siRNA antisense strand against MASP2
ucaucugugacaaaggugaug

SEQ ID NO: 1307 - RNA, 21 nt, Artificial Sequence
  siRNA antisense strand against MASP2
auucaucugugacaaagguga

SEQ ID NO: 1308 - RNA, 21 nt, Artificial Sequence
  siRNA antisense strand against MASP2
gauucaucugugacaaaggug

SEQ ID NO: 1309 - RNA, 21 nt, Artificial Sequence
  siRNA antisense strand against MASP2
ugauucaucugugacaaaggu

SEQ ID NO: 1310 - RNA, 21 nt, Artificial Sequence
  siRNA antisense strand against MASP2
uccugauucaucugugacaaa

SEQ ID NO: 1311 - RNA, 21 nt, Artificial Sequence
  siRNA antisense strand against MASP2
ucuccugauucaucugugaca

SEQ ID NO: 1312 - RNA, 21 nt, Artificial Sequence
  siRNA antisense strand against MASP2
ggucuccugauucaucuguga

SEQ ID NO: 1313 - RNA, 21 nt, Artificial Sequence
  siRNA antisense strand against MASP2
uggucuccugauucaucugug

SEQ ID NO: 1314 - RNA, 21 nt, Artificial Sequence
  siRNA antisense strand against MASP2
guggucuccugauucaucugu

SEQ ID NO: 1315 - RNA, 21 nt, Artificial Sequence
  siRNA antisense strand against MASP2
cagccuguguggucuccugau

SEQ ID NO: 1316 - RNA, 21 nt, Artificial Sequence
  siRNA antisense strand against MASP2
uuccagccuguguggucuccu

SEQ ID NO: 1317 - RNA, 21 nt, Artificial Sequence
  siRNA antisense strand against MASP2
cuuccagccuguguggucucc

SEQ ID NO: 1318 - RNA, 21 nt, Artificial Sequence
  siRNA antisense strand against MASP2
ucuuccagccuguguggucuc

SEQ ID NO: 1319 - RNA, 21 nt, Artificial Sequence
  siRNA antisense strand against MASP2
aucuuccagccuguguggucu

SEQ ID NO: 1320 - RNA, 21 nt, Artificial Sequence
  siRNA antisense strand against MASP2
ggaucuuccagccuguguggu

SEQ ID NO: 1321 - RNA, 21 nt, Artificial Sequence
  siRNA antisense strand against MASP2
aguggaucuuccagccugugu

SEQ ID NO: 1322 - RNA, 21 nt, Artificial Sequence
  siRNA antisense strand against MASP2
uaguggaucuuccagccugug

SEQ ID NO: 1323 - RNA, 21 nt, Artificial Sequence
  siRNA antisense strand against MASP2
guaguggaucuuccagccugu

SEQ ID NO: 1324 - RNA, 21 nt, Artificial Sequence
  siRNA antisense strand against MASP2
uguaguggaucuuccagccug

SEQ ID NO: 1325 - RNA, 21 nt, Artificial Sequence
  siRNA antisense strand against MASP2
guguaguggaucuuccagccu

SEQ ID NO: 1326 - RNA, 21 nt, Artificial Sequence
  siRNA antisense strand against MASP2
cguguaguggaucuuccagcc

SEQ ID NO: 1327 - RNA, 21 nt, Artificial Sequence
  siRNA antisense strand against MASP2
ucguguaguggaucuuccagc

SEQ ID NO: 1328 - RNA, 21 nt, Artificial Sequence
  siRNA antisense strand against MASP2
cucguguaguggaucuuccag

SEQ ID NO: 1329 - RNA, 21 nt, Artificial Sequence
  siRNA antisense strand against MASP2
gugcucguguaguggaucuuc

SEQ ID NO: 1330 - RNA, 21 nt, Artificial Sequence
  siRNA antisense strand against MASP2
ugugcucguguaguggaucuu

SEQ ID NO: 1331 - RNA, 21 nt, Artificial Sequence
  siRNA antisense strand against MASP2
cgcugugcucguguaguggau

SEQ ID NO: 1332 - RNA, 21 nt, Artificial Sequence
  siRNA antisense strand against MASP2
ugcgcugugcucguguagugg

SEQ ID NO: 1333 - RNA, 21 nt, Artificial Sequence
  siRNA antisense strand against MASP2
cugcgcugugcucguguagug

SEQ ID NO: 1334 - RNA, 21 nt, Artificial Sequence
  siRNA antisense strand against MASP2
aagggcaaggcugcgcugugc

SEQ ID NO: 1335 - RNA, 21 nt, Artificial Sequence
  siRNA antisense strand against MASP2
uaagggcaaggcugcgcugug

SEQ ID NO: 1336 - RNA, 21 nt, Artificial Sequence
  siRNA antisense strand against MASP2
auaagggcaaggcugcgcugu

SEQ ID NO: 1337 - RNA, 21 nt, Artificial Sequence
  siRNA antisense strand against MASP2
gauaagggcaaggcugcgcug

SEQ ID NO: 1338 - RNA, 21 nt, Artificial Sequence
  siRNA antisense strand against MASP2
ucggauaagggcaaggcugcg

SEQ ID NO: 1339 - RNA, 21 nt, Artificial Sequence
  siRNA antisense strand against MASP2
aucggauaagggcaaggcugc

SEQ ID NO: 1340 - RNA, 21 nt, Artificial Sequence
  siRNA antisense strand against MASP2
caucggauaagggcaaggcug

SEQ ID NO: 1341 - RNA, 21 nt, Artificial Sequence
  siRNA antisense strand against MASP2
ggcgccaucggauaagggcaa

SEQ ID NO: 1342 - RNA, 21 nt, Artificial Sequence
  siRNA antisense strand against MASP2
uuagguggcgccaucggauaa

SEQ ID NO: 1343 - RNA, 21 nt, Artificial Sequence
  siRNA antisense strand against MASP2
auuagguggcgccaucggaua

SEQ ID NO: 1344 - RNA, 21 nt, Artificial Sequence
  siRNA antisense strand against MASP2
ccauuagguggcgccaucgga

SEQ ID NO: 1345 - RNA, 21 nt, Artificial Sequence
  siRNA antisense strand against MASP2
uggccauuagguggcgccauc

SEQ ID NO: 1346 - RNA, 21 nt, Artificial Sequence
  siRNA antisense strand against MASP2
guggccauuagguggcgccau

SEQ ID NO: 1347 - RNA, 21 nt, Artificial Sequence
  siRNA antisense strand against MASP2
aaacguggccauuagguggcg

SEQ ID NO: 1348 - RNA, 21 nt, Artificial Sequence
  siRNA antisense strand against MASP2
gaaacguggccauuagguggc

SEQ ID NO: 1349 - RNA, 21 nt, Artificial Sequence
  siRNA antisense strand against MASP2
ugaaacguggccauuaggugg

SEQ ID NO: 1350 - RNA, 21 nt, Artificial Sequence
  siRNA antisense strand against MASP2
aggugaaacguggccauuagg

SEQ ID NO: 1351 - RNA, 21 nt, Artificial Sequence
  siRNA antisense strand against MASP2
acaggugaaacguggccauua

SEQ ID NO: 1352 - RNA, 21 nt, Artificial Sequence
  siRNA antisense strand against MASP2
cacaggugaaacguggccauu

SEQ ID NO: 1353 - RNA, 21 nt, Artificial Sequence
  siRNA antisense strand against MASP2
gcacaggugaaacguggccau

SEQ ID NO: 1354 - RNA, 21 nt, Artificial Sequence
  siRNA antisense strand against MASP2
cuugcacaggugaaacguggc

SEQ ID NO: 1355 - RNA, 21 nt, Artificial Sequence
  siRNA antisense strand against MASP2
gcuugcacaggugaaacgugg

SEQ ID NO: 1356 - RNA, 21 nt, Artificial Sequence
  siRNA antisense strand against MASP2
ggcuugcacaggugaaacgug

SEQ ID NO: 1357 - RNA, 21 nt, Artificial Sequence
  siRNA antisense strand against MASP2
uuggcuugcacaggugaaacg

SEQ ID NO: 1358 - RNA, 21 nt, Artificial Sequence
  siRNA antisense strand against MASP2
uuuggcuugcacaggugaaac

SEQ ID NO: 1359 - RNA, 21 nt, Artificial Sequence
  siRNA antisense strand against MASP2
uauuuggcuugcacaggugaa

SEQ ID NO: 1360 - RNA, 21 nt, Artificial Sequence
  siRNA antisense strand against MASP2
guauuuggcuugcacagguga

SEQ ID NO: 1361 - RNA, 21 nt, Artificial Sequence
  siRNA antisense strand against MASP2
uguauuuggcuugcacaggug

SEQ ID NO: 1362 - RNA, 21 nt, Artificial Sequence
  siRNA antisense strand against MASP2
auguauuuggcuugcacaggu

SEQ ID NO: 1363 - RNA, 21 nt, Artificial Sequence
  siRNA antisense strand against MASP2
gauguauuuggcuugcacagg

SEQ ID NO: 1364 - RNA, 21 nt, Artificial Sequence
  siRNA antisense strand against MASP2
ggauguauuuggcuugcacag

SEQ ID NO: 1365 - RNA, 21 nt, Artificial Sequence
  siRNA antisense strand against MASP2
ucaggauguauuuggcuugca

SEQ ID NO: 1366 - RNA, 21 nt, Artificial Sequence
  siRNA antisense strand against MASP2
uucaggauguauuuggcuugc

SEQ ID NO: 1367 - RNA, 21 nt, Artificial Sequence
  siRNA antisense strand against MASP2
uuucaggauguauuuggcuug

SEQ ID NO: 1368 - RNA, 21 nt, Artificial Sequence
  siRNA antisense strand against MASP2
cuuucaggauguauuuggcuu

SEQ ID NO: 1369 - RNA, 21 nt, Artificial Sequence
  siRNA antisense strand against MASP2
ucuuucaggauguauuuggcu

SEQ ID NO: 1370 - RNA, 21 nt, Artificial Sequence
  siRNA antisense strand against MASP2
gucuuucaggauguauuuggc

SEQ ID NO: 1371 - RNA, 21 nt, Artificial Sequence
  siRNA antisense strand against MASP2
ugucuuucaggauguauuugg

SEQ ID NO: 1372 - RNA, 21 nt, Artificial Sequence
  siRNA antisense strand against MASP2
gaagcugucuuucaggaugua

SEQ ID NO: 1373 - RNA, 21 nt, Artificial Sequence
  siRNA antisense strand against MASP2
gagaagcugucuuucaggaug

SEQ ID NO: 1374 - RNA, 21 nt, Artificial Sequence
  siRNA antisense strand against MASP2
uggagaagcugucuuucagga

SEQ ID NO: 1375 - RNA, 21 nt, Artificial Sequence
  siRNA antisense strand against MASP2
auggagaagcugucuuucagg

SEQ ID NO: 1376 - RNA, 21 nt, Artificial Sequence
  siRNA antisense strand against MASP2
gauggagaagcugucuuucag

SEQ ID NO: 1377 - RNA, 21 nt, Artificial Sequence
  siRNA antisense strand against MASP2
aaagauggagaagcugucuuu

SEQ ID NO: 1378 - RNA, 21 nt, Artificial Sequence
  siRNA antisense strand against MASP2
aaaagauggagaagcugucuu

SEQ ID NO: 1379 - RNA, 21 nt, Artificial Sequence
  siRNA antisense strand against MASP2
ucgcaaaagauggagaagcug

SEQ ID NO: 1380 - RNA, 21 nt, Artificial Sequence
  siRNA antisense strand against MASP2
agucucgcaaaagauggagaa

SEQ ID NO: 1381 - RNA, 21 nt, Artificial Sequence
  siRNA antisense strand against MASP2
ccagucucgcaaaagauggag

SEQ ID NO: 1382 - RNA, 21 nt, Artificial Sequence
  siRNA antisense strand against MASP2
gccagucucgcaaaagaugga

SEQ ID NO: 1383 - RNA, 21 nt, Artificial Sequence
  siRNA antisense strand against MASP2
agccagucucgcaaaagaugg

SEQ ID NO: 1384 - RNA, 21 nt, Artificial Sequence
  siRNA antisense strand against MASP2
agcucauagccagucucgcaa

SEQ ID NO: 1385 - RNA, 21 nt, Artificial Sequence
  siRNA antisense strand against MASP2
aagcucauagccagucucgca

SEQ ID NO: 1386 - RNA, 21 nt, Artificial Sequence
  siRNA antisense strand against MASP2
agaagcucauagccagucucg

SEQ ID NO: 1387 - RNA, 21 nt, Artificial Sequence
  siRNA antisense strand against MASP2
ugcagaagcucauagccaguc

SEQ ID NO: 1388 - RNA, 21 nt, Artificial Sequence
  siRNA antisense strand against MASP2
cuugcagaagcucauagccag

SEQ ID NO: 1389 - RNA, 21 nt, Artificial Sequence
  siRNA antisense strand against MASP2
ccuugcagaagcucauagcca

SEQ ID NO: 1390 - RNA, 21 nt, Artificial Sequence
  siRNA antisense strand against MASP2
agugaccuugcagaagcucau

SEQ ID NO: 1391 - RNA, 21 nt, Artificial Sequence
  siRNA antisense strand against MASP2
aagugaccuugcagaagcuca

SEQ ID NO: 1392 - RNA, 21 nt, Artificial Sequence
  siRNA antisense strand against MASP2
caggggcaagugaccuugcag

SEQ ID NO: 1393 - RNA, 21 nt, Artificial Sequence
  siRNA antisense strand against MASP2
ucaggggcaagugaccuugca

SEQ ID NO: 1394 - RNA, 21 nt, Artificial Sequence
  siRNA antisense strand against MASP2
uucaggggcaagugaccuugc

SEQ ID NO: 1395 - RNA, 21 nt, Artificial Sequence
  siRNA antisense strand against MASP2
uuucaggggcaagugaccuug

SEQ ID NO: 1396 - RNA, 21 nt, Artificial Sequence
  siRNA antisense strand against MASP2
auuucaggggcaagugaccuu

SEQ ID NO: 1397 - RNA, 21 nt, Artificial Sequence
  siRNA antisense strand against MASP2
gauuucaggggcaagugaccu

SEQ ID NO: 1398 - RNA, 21 nt, Artificial Sequence
  siRNA antisense strand against MASP2
aaaggauuucaggggcaagug

SEQ ID NO: 1399 - RNA, 21 nt, Artificial Sequence
  siRNA antisense strand against MASP2
uaaaggauuucaggggcaagu

SEQ ID NO: 1400 - RNA, 21 nt, Artificial Sequence
  siRNA antisense strand against MASP2
guaaaggauuucaggggcaag

SEQ ID NO: 1401 - RNA, 21 nt, Artificial Sequence
  siRNA antisense strand against MASP2
aguaaaggauuucaggggcaa

SEQ ID NO: 1402 - RNA, 21 nt, Artificial Sequence
  siRNA antisense strand against MASP2
caguaaaggauuucaggggca

SEQ ID NO: 1403 - RNA, 21 nt, Artificial Sequence
  siRNA antisense strand against MASP2
gcaguaaaggauuucaggggc

SEQ ID NO: 1404 - RNA, 21 nt, Artificial Sequence
  siRNA antisense strand against MASP2
ugcaguaaaggauuucagggg

SEQ ID NO: 1405 - RNA, 21 nt, Artificial Sequence
  siRNA antisense strand against MASP2
aacugcaguaaaggauuucag

SEQ ID NO: 1406 - RNA, 21 nt, Artificial Sequence
  siRNA antisense strand against MASP2
aaacugcaguaaaggauuuca

SEQ ID NO: 1407 - RNA, 21 nt, Artificial Sequence
  siRNA antisense strand against MASP2
acaaacugcaguaaaggauuu

SEQ ID NO: 1408 - RNA, 21 nt, Artificial Sequence
  siRNA antisense strand against MASP2
gacaaacugcaguaaaggauu

SEQ ID NO: 1409 - RNA, 21 nt, Artificial Sequence
  siRNA antisense strand against MASP2
ugacaaacugcaguaaaggau

SEQ ID NO: 1410 - RNA, 21 nt, Artificial Sequence
  siRNA antisense strand against MASP2
cugacaaacugcaguaaagga

SEQ ID NO: 1411 - RNA, 21 nt, Artificial Sequence
  siRNA antisense strand against MASP2
uuucugacaaacugcaguaaa

SEQ ID NO: 1412 - RNA, 21 nt, Artificial Sequence
  siRNA antisense strand against MASP2
cuuucugacaaacugcaguaa

SEQ ID NO: 1413 - RNA, 21 nt, Artificial Sequence
  siRNA antisense strand against MASP2
ucuuucugacaaacugcagua

SEQ ID NO: 1414 - RNA, 21 nt, Artificial Sequence
  siRNA antisense strand against MASP2
aucuuucugacaaacugcagu

SEQ ID NO: 1415 - RNA, 21 nt, Artificial Sequence
  siRNA antisense strand against MASP2
ccaucuuucugacaaacugca

SEQ ID NO: 1416 - RNA, 21 nt, Artificial Sequence
  siRNA antisense strand against MASP2
auccaucuuucugacaaacug

SEQ ID NO: 1417 - RNA, 21 nt, Artificial Sequence
  siRNA antisense strand against MASP2
agauccaucuuucugacaaac

SEQ ID NO: 1418 - RNA, 21 nt, Artificial Sequence
  siRNA antisense strand against MASP2
cccaagauccaucuuucugac

SEQ ID NO: 1419 - RNA, 21 nt, Artificial Sequence
  siRNA antisense strand against MASP2
ucccaagauccaucuuucuga

SEQ ID NO: 1420 - RNA, 21 nt, Artificial Sequence
  siRNA antisense strand against MASP2
gucccaagauccaucuuucug

SEQ ID NO: 1421 - RNA, 21 nt, Artificial Sequence
  siRNA antisense strand against MASP2
ccggucccaagauccaucuuu

SEQ ID NO: 1422 - RNA, 21 nt, Artificial Sequence
  siRNA antisense strand against MASP2
gccggucccaagauccaucuu

SEQ ID NO: 1423 - RNA, 21 nt, Artificial Sequence
  siRNA antisense strand against MASP2
ugcugcacgcgggcauuggcc

SEQ ID NO: 1424 - RNA, 21 nt, Artificial Sequence
  siRNA antisense strand against MASP2
augcugcacgcgggcauuggc

SEQ ID NO: 1425 - RNA, 21 nt, Artificial Sequence
  siRNA antisense strand against MASP2
aaugcugcacgcgggcauugg

SEQ ID NO: 1426 - RNA, 21 nt, Artificial Sequence
  siRNA antisense strand against MASP2
caacaaugcugcacgcgggca

SEQ ID NO: 1427 - RNA, 21 nt, Artificial Sequence
  siRNA antisense strand against MASP2
ucaacaaugcugcacgcgggc

SEQ ID NO: 1428 - RNA, 21 nt, Artificial Sequence
  siRNA antisense strand against MASP2
cagucaacaaugcugcacgcg

SEQ ID NO: 1429 - RNA, 21 nt, Artificial Sequence
  siRNA antisense strand against MASP2
acagucaacaaugcugcacgc

SEQ ID NO: 1430 - RNA, 21 nt, Artificial Sequence
  siRNA antisense strand against MASP2
ccacagucaacaaugcugcac

SEQ ID NO: 1431 - RNA, 21 nt, Artificial Sequence
  siRNA antisense strand against MASP2
gggccacagucaacaaugcug

SEQ ID NO: 1432 - RNA, 21 nt, Artificial Sequence
  siRNA antisense strand against MASP2
agggccacagucaacaaugcu

SEQ ID NO: 1433 - RNA, 21 nt, Artificial Sequence
  siRNA antisense strand against MASP2
gagggccacagucaacaaugc

SEQ ID NO: 1434 - RNA, 21 nt, Artificial Sequence
  siRNA antisense strand against MASP2
aucaggagggccacagucaac

SEQ ID NO: 1435 - RNA, 21 nt, Artificial Sequence
  siRNA antisense strand against MASP2
caucaggagggccacagucaa

SEQ ID NO: 1436 - RNA, 21 nt, Artificial Sequence
  siRNA antisense strand against MASP2
ucaucaggagggccacaguca

SEQ ID NO: 1437 - RNA, 21 nt, Artificial Sequence
  siRNA antisense strand against MASP2
aucaucaggagggccacaguc

SEQ ID NO: 1438 - RNA, 21 nt, Artificial Sequence
  siRNA antisense strand against MASP2
uagaucaucaggagggccaca

SEQ ID NO: 1439 - RNA, 21 nt, Artificial Sequence
  siRNA antisense strand against MASP2
gguagaucaucaggagggcca

SEQ ID NO: 1440 - RNA, 21 nt, Artificial Sequence
  siRNA antisense strand against MASP2
uggguagaucaucaggagggc

SEQ ID NO: 1441 - RNA, 21 nt, Artificial Sequence
  siRNA antisense strand against MASP2
acuggguagaucaucaggagg

SEQ ID NO: 1442 - RNA, 21 nt, Artificial Sequence
  siRNA antisense strand against MASP2
cacuggguagaucaucaggag

SEQ ID NO: 1443 - RNA, 21 nt, Artificial Sequence
  siRNA antisense strand against MASP2
ccacuggguagaucaucagga

SEQ ID NO: 1444 - RNA, 21 nt, Artificial Sequence
  siRNA antisense strand against MASP2
uccacucggccacuggguaga

SEQ ID NO: 1445 - RNA, 21 nt, Artificial Sequence
  siRNA antisense strand against MASP2
cuccacucggccacuggguag

SEQ ID NO: 1446 - RNA, 21 nt, Artificial Sequence
  siRNA antisense strand against MASP2
acuccacucggccacugggua

SEQ ID NO: 1447 - RNA, 21 nt, Artificial Sequence
  siRNA antisense strand against MASP2
uacuccacucggccacugggu

SEQ ID NO: 1448 - RNA, 21 nt, Artificial Sequence
  siRNA antisense strand against MASP2
auguacuccacucggccacug

SEQ ID NO: 1449 - RNA, 21 nt, Artificial Sequence
  siRNA antisense strand against MASP2
ugauguacuccacucggccac

SEQ ID NO: 1450 - RNA, 21 nt, Artificial Sequence
  siRNA antisense strand against MASP2
gugauguacuccacucggcca

SEQ ID NO: 1451 - RNA, 21 nt, Artificial Sequence
  siRNA antisense strand against MASP2
ugugauguacuccacucggcc

SEQ ID NO: 1452 - RNA, 21 nt, Artificial Sequence
  siRNA antisense strand against MASP2
cugugauguacuccacucggc

SEQ ID NO: 1453 - RNA, 21 nt, Artificial Sequence
  siRNA antisense strand against MASP2
ccugugauguacuccacucgg

SEQ ID NO: 1454 - RNA, 21 nt, Artificial Sequence
  siRNA antisense strand against MASP2
accugugauguacuccacucg

SEQ ID NO: 1455 - RNA, 21 nt, Artificial Sequence
  siRNA antisense strand against MASP2
gaccugugauguacuccacuc

SEQ ID NO: 1456 - RNA, 21 nt, Artificial Sequence
  siRNA antisense strand against MASP2
aggaccugugauguacuccac

SEQ ID NO: 1457 - RNA, 21 nt, Artificial Sequence
  siRNA antisense strand against MASP2
caggaccugugauguacucca

SEQ ID NO: 1458 - RNA, 21 nt, Artificial Sequence
  siRNA antisense strand against MASP2
uccaggaccugugauguacuc

SEQ ID NO: 1459 - RNA, 21 nt, Artificial Sequence
  siRNA antisense strand against MASP2
ggucacuccaggaccugugau

SEQ ID NO: 1460 - RNA, 21 nt, Artificial Sequence
  siRNA antisense strand against MASP2
uggucacuccaggaccuguga

SEQ ID NO: 1461 - RNA, 21 nt, Artificial Sequence
  siRNA antisense strand against MASP2
uguagguggucacuccaggac

SEQ ID NO: 1462 - RNA, 21 nt, Artificial Sequence
  siRNA antisense strand against MASP2
uuuguagguggucacuccagg

SEQ ID NO: 1463 - RNA, 21 nt, Artificial Sequence
  siRNA antisense strand against MASP2
cuuuguagguggucacuccag

SEQ ID NO: 1464 - RNA, 21 nt, Artificial Sequence
  siRNA antisense strand against MASP2
gcuuuguagguggucacucca

SEQ ID NO: 1465 - RNA, 21 nt, Artificial Sequence
  siRNA antisense strand against MASP2
agcuuuguagguggucacucc

SEQ ID NO: 1466 - RNA, 21 nt, Artificial Sequence
  siRNA antisense strand against MASP2
acagcuuuguagguggucacu

SEQ ID NO: 1467 - RNA, 21 nt, Artificial Sequence
  siRNA antisense strand against MASP2
aaucacagcuuuguagguggu

SEQ ID NO: 1468 - RNA, 21 nt, Artificial Sequence
  siRNA antisense strand against MASP2
ugaaucacagcuuuguaggug

SEQ ID NO: 1469 - RNA, 21 nt, Artificial Sequence
  siRNA antisense strand against MASP2
cugaaucacagcuuuguaggu

SEQ ID NO: 1470 - RNA, 21 nt, Artificial Sequence
  siRNA antisense strand against MASP2
uacugaaucacagcuuuguag

SEQ ID NO: 1471 - RNA, 21 nt, Artificial Sequence
  siRNA antisense strand against MASP2
guacugaaucacagcuuugua

SEQ ID NO: 1472 - RNA, 21 nt, Artificial Sequence
  siRNA antisense strand against MASP2
uguacugaaucacagcuuugu

SEQ ID NO: 1473 - RNA, 21 nt, Artificial Sequence
  siRNA antisense strand against MASP2
gcuguacugaaucacagcuuu

SEQ ID NO: 1474 - RNA, 21 nt, Artificial Sequence
  siRNA antisense strand against MASP2
uucacagcuguacugaaucac

SEQ ID NO: 1475 - RNA, 21 nt, Artificial Sequence
  siRNA antisense strand against MASP2
ucuucacagcuguacugaauc

SEQ ID NO: 1476 - RNA, 21 nt, Artificial Sequence
  siRNA antisense strand against MASP2
cucuucacagcuguacugaau

SEQ ID NO: 1477 - RNA, 21 nt, Artificial Sequence
  siRNA antisense strand against MASP2
ucucuucacagcuguacugaa

SEQ ID NO: 1478 - RNA, 21 nt, Artificial Sequence
  siRNA antisense strand against MASP2
ggucucuucacagcuguacug

SEQ ID NO: 1479 - RNA, 21 nt, Artificial Sequence
  siRNA antisense strand against MASP2
aaggucucuucacagcuguac

SEQ ID NO: 1480 - RNA, 21 nt, Artificial Sequence
  siRNA antisense strand against MASP2
gaaggucucuucacagcugua

SEQ ID NO: 1481 - RNA, 21 nt, Artificial Sequence
  siRNA antisense strand against MASP2
agaaggucucuucacagcugu

SEQ ID NO: 1482 - RNA, 21 nt, Artificial Sequence
  siRNA antisense strand against MASP2
uguagaaggucucuucacagc

SEQ ID NO: 1483 - RNA, 21 nt, Artificial Sequence
  siRNA antisense strand against MASP2
guguagaaggucucuucacag

SEQ ID NO: 1484 - RNA, 21 nt, Artificial Sequence
  siRNA antisense strand against MASP2
uguguagaaggucucuucaca

SEQ ID NO: 1485 - RNA, 21 nt, Artificial Sequence
  siRNA antisense strand against MASP2
uuguguagaaggucucuucac

SEQ ID NO: 1486 - RNA, 21 nt, Artificial Sequence
  siRNA antisense strand against MASP2
auuguguagaaggucucuuca

SEQ ID NO: 1487 - RNA, 21 nt, Artificial Sequence
  siRNA antisense strand against MASP2
cauuguguagaaggucucuuc

SEQ ID NO: 1488 - RNA, 21 nt, Artificial Sequence
  siRNA antisense strand against MASP2
ucauuguguagaaggucucuu

SEQ ID NO: 1489 - RNA, 21 nt, Artificial Sequence
  siRNA antisense strand against MASP2
uucauuguguagaaggucucu

SEQ ID NO: 1490 - RNA, 21 nt, Artificial Sequence
  siRNA antisense strand against MASP2
uuucauuguguagaaggucuc

SEQ ID NO: 1491 - RNA, 21 nt, Artificial Sequence
  siRNA antisense strand against MASP2
cuuucauuguguagaaggucu

SEQ ID NO: 1492 - RNA, 21 nt, Artificial Sequence
  siRNA antisense strand against MASP2
acuuucauuguguagaagguc

SEQ ID NO: 1493 - RNA, 21 nt, Artificial Sequence
  siRNA antisense strand against MASP2
cacuuucauuguguagaaggu

SEQ ID NO: 1494 - RNA, 21 nt, Artificial Sequence
  siRNA antisense strand against MASP2
ucacuuucauuguguagaagg

SEQ ID NO: 1495 - RNA, 21 nt, Artificial Sequence
  siRNA antisense strand against MASP2
uucacuuucauuguguagaag

SEQ ID NO: 1496 - RNA, 21 nt, Artificial Sequence
  siRNA antisense strand against MASP2
auucacuuucauuguguagaa

SEQ ID NO: 1497 - RNA, 21 nt, Artificial Sequence
  siRNA antisense strand against MASP2
ucauucacuuucauuguguag

SEQ ID NO: 1498 - RNA, 21 nt, Artificial Sequence
  siRNA antisense strand against MASP2
aucauucacuuucauugugua

SEQ ID NO: 1499 - RNA, 21 nt, Artificial Sequence
  siRNA antisense strand against MASP2
ccaucauucacuuucauugug

SEQ ID NO: 1500 - RNA, 21 nt, Artificial Sequence
  siRNA antisense strand against MASP2
accaucauucacuuucauugu

SEQ ID NO: 1501 - RNA, 21 nt, Artificial Sequence
  siRNA antisense strand against MASP2
uaccaucauucacuuucauug

SEQ ID NO: 1502 - RNA, 21 nt, Artificial Sequence
  siRNA antisense strand against MASP2
uuuaccaucauucacuuucau

SEQ ID NO: 1503 - RNA, 21 nt, Artificial Sequence
  siRNA antisense strand against MASP2
uauuuaccaucauucacuuuc

SEQ ID NO: 1504 - RNA, 21 nt, Artificial Sequence
  siRNA antisense strand against MASP2
auauuuaccaucauucacuuu

SEQ ID NO: 1505 - RNA, 21 nt, Artificial Sequence
  siRNA antisense strand against MASP2
cauauuuaccaucauucacuu

SEQ ID NO: 1506 - RNA, 21 nt, Artificial Sequence
  siRNA antisense strand against MASP2
acauauuuaccaucauucacu

SEQ ID NO: 1507 - RNA, 21 nt, Artificial Sequence
  siRNA antisense strand against MASP2
cacauauuuaccaucauucac

SEQ ID NO: 1508 - RNA, 21 nt, Artificial Sequence
  siRNA antisense strand against MASP2
ccucacacacauauuuaccau

SEQ ID NO: 1509 - RNA, 21 nt, Artificial Sequence
  siRNA antisense strand against MASP2
aucagccucacacacauauuu

SEQ ID NO: 1510 - RNA, 21 nt, Artificial Sequence
  siRNA antisense strand against MASP2
uccaucagccucacacacaua

SEQ ID NO: 1511 - RNA, 21 nt, Artificial Sequence
  siRNA antisense strand against MASP2
auccaucagccucacacacau

SEQ ID NO: 1512 - RNA, 21 nt, Artificial Sequence
  siRNA antisense strand against MASP2
aauccaucagccucacacaca

SEQ ID NO: 1513 - RNA, 21 nt, Artificial Sequence
  siRNA antisense strand against MASP2
gaauccaucagccucacacac

SEQ ID NO: 1514 - RNA, 21 nt, Artificial Sequence
  siRNA antisense strand against MASP2
agaauccaucagccucacaca

SEQ ID NO: 1515 - RNA, 21 nt, Artificial Sequence
  siRNA antisense strand against MASP2
cagaauccaucagccucacac

SEQ ID NO: 1516 - RNA, 21 nt, Artificial Sequence
  siRNA antisense strand against MASP2
uccagaauccaucagccucac

SEQ ID NO: 1517 - RNA, 21 nt, Artificial Sequence
  siRNA antisense strand against MASP2
cguccagaauccaucagccuc

SEQ ID NO: 1518 - RNA, 21 nt, Artificial Sequence
  siRNA antisense strand against MASP2
ucguccagaauccaucagccu

SEQ ID NO: 1519 - RNA, 21 nt, Artificial Sequence
  siRNA antisense strand against MASP2
agcucguccagaauccaucag

SEQ ID NO: 1520 - RNA, 21 nt, Artificial Sequence
  siRNA antisense strand against MASP2
uuggagcucguccagaaucca

SEQ ID NO: 1521 - RNA, 21 nt, Artificial Sequence
  siRNA antisense strand against MASP2
uuuggagcucguccagaaucc

SEQ ID NO: 1522 - RNA, 21 nt, Artificial Sequence
  siRNA antisense strand against MASP2
uccuuuggagcucguccagaa

SEQ ID NO: 1523 - RNA, 21 nt, Artificial Sequence
  siRNA antisense strand against MASP2
cuccuuuggagcucguccaga

SEQ ID NO: 1524 - RNA, 21 nt, Artificial Sequence
  siRNA antisense strand against MASP2
ucuccuuuggagcucguccag

SEQ ID NO: 1525 - RNA, 21 nt, Artificial Sequence
  siRNA antisense strand against MASP2
uucuccuuuggagcucgucca

SEQ ID NO: 1526 - RNA, 21 nt, Artificial Sequence
  siRNA antisense strand against MASP2
uuuucuccuuuggagcucguc

SEQ ID NO: 1527 - RNA, 21 nt, Artificial Sequence
  siRNA antisense strand against MASP2
uuuuucuccuuuggagcucgu

SEQ ID NO: 1528 - RNA, 21 nt, Artificial Sequence
  siRNA antisense strand against MASP2
auuuuucuccuuuggagcucg

SEQ ID NO: 1529 - RNA, 21 nt, Artificial Sequence
  siRNA antisense strand against MASP2
gauuuuucuccuuuggagcuc

SEQ ID NO: 1530 - RNA, 21 nt, Artificial Sequence
  siRNA antisense strand against MASP2
ugauuuuucuccuuuggagcu

SEQ ID NO: 1531 - RNA, 21 nt, Artificial Sequence
  siRNA antisense strand against MASP2
agugauuuuucuccuuuggag

SEQ ID NO: 1532 - RNA, 21 nt, Artificial Sequence
  siRNA antisense strand against MASP2
ugggagugauuuuucuccuuu

SEQ ID NO: 1533 - RNA, 21 nt, Artificial Sequence
  siRNA antisense strand against MASP2
cugggagugauuuuucuccuu

SEQ ID NO: 1534 - RNA, 21 nt, Artificial Sequence
  siRNA antisense strand against MASP2
gacugggagugauuuuucucc

SEQ ID NO: 1535 - RNA, 21 nt, Artificial Sequence
  siRNA antisense strand against MASP2
agacugggagugauuuuucuc

SEQ ID NO: 1536 - RNA, 21 nt, Artificial Sequence
  siRNA antisense strand against MASP2
cagacugggagugauuuuucu

SEQ ID NO: 1537 - RNA, 21 nt, Artificial Sequence
  siRNA antisense strand against MASP2
acagacugggagugauuuuuc

SEQ ID NO: 1538 - RNA, 21 nt, Artificial Sequence
  siRNA antisense strand against MASP2
caggcucacagacugggagug

SEQ ID NO: 1539 - RNA, 21 nt, Artificial Sequence
  siRNA antisense strand against MASP2
acaggcucacagacugggagu

SEQ ID NO: 1540 - RNA, 21 nt, Artificial Sequence
  siRNA antisense strand against MASP2
aacaggcucacagacugggag

SEQ ID NO: 1541 - RNA, 21 nt, Artificial Sequence
  siRNA antisense strand against MASP2
caaacaggcucacagacuggg

SEQ ID NO: 1542 - RNA, 21 nt, Artificial Sequence
  siRNA antisense strand against MASP2
uccacaaacaggcucacagac

SEQ ID NO: 1543 - RNA, 21 nt, Artificial Sequence
  siRNA antisense strand against MASP2
uaguccacaaacaggcucaca

SEQ ID NO: 1544 - RNA, 21 nt, Artificial Sequence
  siRNA antisense strand against MASP2
ugauaguccacaaacaggcuc

SEQ ID NO: 1545 - RNA, 21 nt, Artificial Sequence
  siRNA antisense strand against MASP2
cugauaguccacaaacaggcu

SEQ ID NO: 1546 - RNA, 21 nt, Artificial Sequence
  siRNA antisense strand against MASP2
gcugauaguccacaaacaggc

SEQ ID NO: 1547 - RNA, 21 nt, Artificial Sequence
  siRNA antisense strand against MASP2
ugugcgggcugauaguccaca

SEQ ID NO: 1548 - RNA, 21 nt, Artificial Sequence
  siRNA antisense strand against MASP2
uguugugcgggcugauagucc

SEQ ID NO: 1549 - RNA, 21 nt, Artificial Sequence
  siRNA antisense strand against MASP2
cuguugugcgggcugauaguc

SEQ ID NO: 1550 - RNA, 21 nt, Artificial Sequence
  siRNA antisense strand against MASP2
acgcccuccuguugugcgggc

SEQ ID NO: 1551 - RNA, 21 nt, Artificial Sequence
  siRNA antisense strand against MASP2
uacgcccuccuguugugcggg

SEQ ID NO: 1552 - RNA, 21 nt, Artificial Sequence
  siRNA antisense strand against MASP2
auacgcccuccuguugugcgg

SEQ ID NO: 1553 - RNA, 21 nt, Artificial Sequence
  siRNA antisense strand against MASP2
uauacgcccuccuguugugcg

SEQ ID NO: 1554 - RNA, 21 nt, Artificial Sequence
  siRNA antisense strand against MASP2
auauacgcccuccuguugugc

SEQ ID NO: 1555 - RNA, 21 nt, Artificial Sequence
  siRNA antisense strand against MASP2
uauauacgcccuccuguugug

SEQ ID NO: 1556 - RNA, 21 nt, Artificial Sequence
  siRNA antisense strand against MASP2
auauauacgcccuccuguugu

SEQ ID NO: 1557 - RNA, 21 nt, Artificial Sequence
  siRNA antisense strand against MASP2
uugcccuccauauauacgccc

SEQ ID NO: 1558 - RNA, 21 nt, Artificial Sequence
  siRNA antisense strand against MASP2
uuugcccuccauauauacgcc

SEQ ID NO: 1559 - RNA, 21 nt, Artificial Sequence
  siRNA antisense strand against MASP2
ugccuuuugcccuccauauau

SEQ ID NO: 1560 - RNA, 21 nt, Artificial Sequence
  siRNA antisense strand against MASP2
uugccuuuugcccuccauaua

SEQ ID NO: 1561 - RNA, 21 nt, Artificial Sequence
  siRNA antisense strand against MASP2
guuuugccuuuugcccuccau

SEQ ID NO: 1562 - RNA, 21 nt, Artificial Sequence
  siRNA antisense strand against MASP2
agguuuugccuuuugcccucc

SEQ ID NO: 1563 - RNA, 21 nt, Artificial Sequence
  siRNA antisense strand against MASP2
cagguuuugccuuuugcccuc

SEQ ID NO: 1564 - RNA, 21 nt, Artificial Sequence
  siRNA antisense strand against MASP2
ccagguuuugccuuuugcccu

SEQ ID NO: 1565 - RNA, 21 nt, Artificial Sequence
  siRNA antisense strand against MASP2
accagguuuugccuuuugccc

SEQ ID NO: 1566 - RNA, 21 nt, Artificial Sequence
  siRNA antisense strand against MASP2
aucaccagguuuugccuuuug

SEQ ID NO: 1567 - RNA, 21 nt, Artificial Sequence
  siRNA antisense strand against MASP2
aaucaccagguuuugccuuuu

SEQ ID NO: 1568 - RNA, 21 nt, Artificial Sequence
  siRNA antisense strand against MASP2
aaaucaccagguuuugccuuu

SEQ ID NO: 1569 - RNA, 21 nt, Artificial Sequence
  siRNA antisense strand against MASP2
aaaaucaccagguuuugccuu

SEQ ID NO: 1570 - RNA, 21 nt, Artificial Sequence
  siRNA antisense strand against MASP2
gaaaaucaccagguuuugccu

SEQ ID NO: 1571 - RNA, 21 nt, Artificial Sequence
  siRNA antisense strand against MASP2
aggaaaaucaccagguuuugc

SEQ ID NO: 1572 - RNA, 21 nt, Artificial Sequence
  siRNA antisense strand against MASP2
aaggaaaaucaccagguuuug

SEQ ID NO: 1573 - RNA, 21 nt, Artificial Sequence
  siRNA antisense strand against MASP2
ccaaggaaaaucaccagguuu

SEQ ID NO: 1574 - RNA, 21 nt, Artificial Sequence
  siRNA antisense strand against MASP2
gccaaggaaaaucaccagguu

SEQ ID NO: 1575 - RNA, 21 nt, Artificial Sequence
  siRNA antisense strand against MASP2
ugccaaggaaaaucaccaggu

SEQ ID NO: 1576 - RNA, 21 nt, Artificial Sequence
  siRNA antisense strand against MASP2
uugccaaggaaaaucaccagg

SEQ ID NO: 1577 - RNA, 21 nt, Artificial Sequence
  siRNA antisense strand against MASP2
cuugccaaggaaaaucaccag

SEQ ID NO: 1578 - RNA, 21 nt, Artificial Sequence
  siRNA antisense strand against MASP2
acuugccaaggaaaaucacca

SEQ ID NO: 1579 - RNA, 21 nt, Artificial Sequence
  siRNA antisense strand against MASP2
gacuugccaaggaaaaucacc

SEQ ID NO: 1580 - RNA, 21 nt, Artificial Sequence
  siRNA antisense strand against MASP2
ggacuugccaaggaaaaucac

SEQ ID NO: 1581 - RNA, 21 nt, Artificial Sequence
  siRNA antisense strand against MASP2
uaucaggacuugccaaggaaa

SEQ ID NO: 1582 - RNA, 21 nt, Artificial Sequence
  siRNA antisense strand against MASP2
auaucaggacuugccaaggaa

SEQ ID NO: 1583 - RNA, 21 nt, Artificial Sequence
  siRNA antisense strand against MASP2
aauaucaggacuugccaagga

SEQ ID NO: 1584 - RNA, 21 nt, Artificial Sequence
  siRNA antisense strand against MASP2
uaauaucaggacuugccaagg

SEQ ID NO: 1585 - RNA, 21 nt, Artificial Sequence
  siRNA antisense strand against MASP2
ccuaauaucaggacuugccaa

SEQ ID NO: 1586 - RNA, 21 nt, Artificial Sequence
  siRNA antisense strand against MASP2
accuaauaucaggacuugcca

SEQ ID NO: 1587 - RNA, 21 nt, Artificial Sequence
  siRNA antisense strand against MASP2
uccaccuaauaucaggacuug

SEQ ID NO: 1588 - RNA, 21 nt, Artificial Sequence
  siRNA antisense strand against MASP2
uuccaccuaauaucaggacuu

SEQ ID NO: 1589 - RNA, 21 nt, Artificial Sequence
  siRNA antisense strand against MASP2
guuccaccuaauaucaggacu

SEQ ID NO: 1590 - RNA, 21 nt, Artificial Sequence
  siRNA antisense strand against MASP2
gguuccaccuaauaucaggac

SEQ ID NO: 1591 - RNA, 21 nt, Artificial Sequence
  siRNA antisense strand against MASP2
ugugguuccaccuaauaucag

SEQ ID NO: 1592 - RNA, 21 nt, Artificial Sequence
  siRNA antisense strand against MASP2
ugcugugguuccaccuaauau

SEQ ID NO: 1593 - RNA, 21 nt, Artificial Sequence
  siRNA antisense strand against MASP2
cugcugugguuccaccuaaua

SEQ ID NO: 1594 - RNA, 21 nt, Artificial Sequence
  siRNA antisense strand against MASP2
ugcugcugugguuccaccuaa

SEQ ID NO: 1595 - RNA, 21 nt, Artificial Sequence
  siRNA antisense strand against MASP2
cugcugcugugguuccaccua

SEQ ID NO: 1596 - RNA, 21 nt, Artificial Sequence
  siRNA antisense strand against MASP2
ccugcugcugugguuccaccu

SEQ ID NO: 1597 - RNA, 21 nt, Artificial Sequence
  siRNA antisense strand against MASP2
gcaccugcugcugugguucca

SEQ ID NO: 1598 - RNA, 21 nt, Artificial Sequence
  siRNA antisense strand against MASP2
ugcaccugcugcugugguucc

SEQ ID NO: 1599 - RNA, 21 nt, Artificial Sequence
  siRNA antisense strand against MASP2
gugcaccugcugcugugguuc

SEQ ID NO: 1600 - RNA, 21 nt, Artificial Sequence
  siRNA antisense strand against MASP2
agugcaccugcugcugugguu

SEQ ID NO: 1601 - RNA, 21 nt, Artificial Sequence
  siRNA antisense strand against MASP2
aagugcaccugcugcuguggu

SEQ ID NO: 1602 - RNA, 21 nt, Artificial Sequence
  siRNA antisense strand against MASP2
aaagugcaccugcugcugugg

SEQ ID NO: 1603 - RNA, 21 nt, Artificial Sequence
  siRNA antisense strand against MASP2
aaaagugcaccugcugcugug

SEQ ID NO: 1604 - RNA, 21 nt, Artificial Sequence
  siRNA antisense strand against MASP2
uaaaagugcaccugcugcugu

SEQ ID NO: 1605 - RNA, 21 nt, Artificial Sequence
  siRNA antisense strand against MASP2
uauaaaagugcaccugcugcu

SEQ ID NO: 1606 - RNA, 21 nt, Artificial Sequence
  siRNA antisense strand against MASP2
auauaaaagugcaccugcugc

SEQ ID NO: 1607 - RNA, 21 nt, Artificial Sequence
  siRNA antisense strand against MASP2
cauauaaaagugcaccugcug

SEQ ID NO: 1608 - RNA, 21 nt, Artificial Sequence
  siRNA antisense strand against MASP2
ucauauaaaagugcaccugcu

SEQ ID NO: 1609 - RNA, 21 nt, Artificial Sequence
  siRNA antisense strand against MASP2
gucauauaaaagugcaccugc

SEQ ID NO: 1610 - RNA, 21 nt, Artificial Sequence
  siRNA antisense strand against MASP2
ugucauauaaaagugcaccug

SEQ ID NO: 1611 - RNA, 21 nt, Artificial Sequence
  siRNA antisense strand against MASP2
uugucauauaaaagugcaccu

SEQ ID NO: 1612 - RNA, 21 nt, Artificial Sequence
  siRNA antisense strand against MASP2
aguugucauauaaaagugcac

SEQ ID NO: 1613 - RNA, 21 nt, Artificial Sequence
  siRNA antisense strand against MASP2
caguugucauauaaaagugca

SEQ ID NO: 1614 - RNA, 21 nt, Artificial Sequence
  siRNA antisense strand against MASP2
uaggacccaguugucauauaa

SEQ ID NO: 1615 - RNA, 21 nt, Artificial Sequence
  siRNA antisense strand against MASP2
uuaggacccaguugucauaua

SEQ ID NO: 1616 - RNA, 21 nt, Artificial Sequence
  siRNA antisense strand against MASP2
agcuguuaggacccaguuguc

SEQ ID NO: 1617 - RNA, 21 nt, Artificial Sequence
  siRNA antisense strand against MASP2
cagcuguuaggacccaguugu

SEQ ID NO: 1618 - RNA, 21 nt, Artificial Sequence
  siRNA antisense strand against MASP2
gcagcuguuaggacccaguug

SEQ ID NO: 1619 - RNA, 21 nt, Artificial Sequence
  siRNA antisense strand against MASP2
ugagcagcuguuaggacccag

SEQ ID NO: 1620 - RNA, 21 nt, Artificial Sequence
  siRNA antisense strand against MASP2
augagcagcuguuaggaccca

SEQ ID NO: 1621 - RNA, 21 nt, Artificial Sequence
  siRNA antisense strand against MASP2
agacggcaugagcagcuguua

SEQ ID NO: 1622 - RNA, 21 nt, Artificial Sequence
  siRNA antisense strand against MASP2
auagacggcaugagcagcugu

SEQ ID NO: 1623 - RNA, 21 nt, Artificial Sequence
  siRNA antisense strand against MASP2
ucauagacggcaugagcagcu

SEQ ID NO: 1624 - RNA, 21 nt, Artificial Sequence
  siRNA antisense strand against MASP2
uugcucauagacggcaugagc

SEQ ID NO: 1625 - RNA, 21 nt, Artificial Sequence
  siRNA antisense strand against MASP2
uuuuugcucauagacggcaug

SEQ ID NO: 1626 - RNA, 21 nt, Artificial Sequence
  siRNA antisense strand against MASP2
uguuuuugcucauagacggca

SEQ ID NO: 1627 - RNA, 21 nt, Artificial Sequence
  siRNA antisense strand against MASP2
auguuuuugcucauagacggc

SEQ ID NO: 1628 - RNA, 21 nt, Artificial Sequence
  siRNA antisense strand against MASP2
ucauguuuuugcucauagacg

SEQ ID NO: 1629 - RNA, 21 nt, Artificial Sequence
  siRNA antisense strand against MASP2
aucauguuuuugcucauagac

SEQ ID NO: 1630 - RNA, 21 nt, Artificial Sequence
  siRNA antisense strand against MASP2
ugcaucauguuuuugcucaua

SEQ ID NO: 1631 - RNA, 21 nt, Artificial Sequence
  siRNA antisense strand against MASP2
augcaucauguuuuugcucau

SEQ ID NO: 1632 - RNA, 21 nt, Artificial Sequence
  siRNA antisense strand against MASP2
ggaugcaucauguuuuugcuc

SEQ ID NO: 1633 - RNA, 21 nt, Artificial Sequence
  siRNA antisense strand against MASP2
uguccagggcggaugcaucau

SEQ ID NO: 1634 - RNA, 21 nt, Artificial Sequence
  siRNA antisense strand against MASP2
auguccagggcggaugcauca

SEQ ID NO: 1635 - RNA, 21 nt, Artificial Sequence
  siRNA antisense strand against MASP2
cccauucgaauguccagggcg

SEQ ID NO: 1636 - RNA, 21 nt, Artificial Sequence
  siRNA antisense strand against MASP2
ggugcccauucgaauguccag

SEQ ID NO: 1637 - RNA, 21 nt, Artificial Sequence
  siRNA antisense strand against MASP2
agggugcccauucgaaugucc

SEQ ID NO: 1638 - RNA, 21 nt, Artificial Sequence
  siRNA antisense strand against MASP2
cagggugcccauucgaauguc

SEQ ID NO: 1639 - RNA, 21 nt, Artificial Sequence
  siRNA antisense strand against MASP2
ucagggugcccauucgaaugu

SEQ ID NO: 1640 - RNA, 21 nt, Artificial Sequence
  siRNA antisense strand against MASP2
uucagggugcccauucgaaug

SEQ ID NO: 1641 - RNA, 21 nt, Artificial Sequence
  siRNA antisense strand against MASP2
uuucagggugcccauucgaau

SEQ ID NO: 1642 - RNA, 21 nt, Artificial Sequence
  siRNA antisense strand against MASP2
uuuucagggugcccauucgaa

SEQ ID NO: 1643 - RNA, 21 nt, Artificial Sequence
  siRNA antisense strand against MASP2
cuuuucagggugcccauucga

SEQ ID NO: 1644 - RNA, 21 nt, Artificial Sequence
  siRNA antisense strand against MASP2
agucuuuucagggugcccauu

SEQ ID NO: 1645 - RNA, 21 nt, Artificial Sequence
  siRNA antisense strand against MASP2
uagucuuuucagggugcccau

SEQ ID NO: 1646 - RNA, 21 nt, Artificial Sequence
  siRNA antisense strand against MASP2
auagucuuuucagggugccca

SEQ ID NO: 1647 - RNA, 21 nt, Artificial Sequence
  siRNA antisense strand against MASP2
gauagucuuuucagggugccc

SEQ ID NO: 1648 - RNA, 21 nt, Artificial Sequence
  siRNA antisense strand against MASP2
ugauagucuuuucagggugcc

SEQ ID NO: 1649 - RNA, 21 nt, Artificial Sequence
  siRNA antisense strand against MASP2
gugauagucuuuucagggugc

SEQ ID NO: 1650 - RNA, 21 nt, Artificial Sequence
  siRNA antisense strand against MASP2
ggugauagucuuuucagggug

SEQ ID NO: 1651 - RNA, 21 nt, Artificial Sequence
  siRNA antisense strand against MASP2
aggugauagucuuuucagggu

SEQ ID NO: 1652 - RNA, 21 nt, Artificial Sequence
  siRNA antisense strand against MASP2
gaggugauagucuuuucaggg

SEQ ID NO: 1653 - RNA, 21 nt, Artificial Sequence
  siRNA antisense strand against MASP2
ugaggugauagucuuuucagg

SEQ ID NO: 1654 - RNA, 21 nt, Artificial Sequence
  siRNA antisense strand against MASP2
augaggugauagucuuuucag

SEQ ID NO: 1655 - RNA, 21 nt, Artificial Sequence
  siRNA antisense strand against MASP2
auaaugaggugauagucuuuu

SEQ ID NO: 1656 - RNA, 21 nt, Artificial Sequence
  siRNA antisense strand against MASP2
uauaaugaggugauagucuuu

SEQ ID NO: 1657 - RNA, 21 nt, Artificial Sequence
  siRNA antisense strand against MASP2
guauaaugaggugauagucuu

SEQ ID NO: 1658 - RNA, 21 nt, Artificial Sequence
  siRNA antisense strand against MASP2
uguauaaugaggugauagucu

SEQ ID NO: 1659 - RNA, 21 nt, Artificial Sequence
  siRNA antisense strand against MASP2
guguauaaugaggugauaguc

SEQ ID NO: 1660 - RNA, 21 nt, Artificial Sequence
  siRNA antisense strand against MASP2
uuguguauaaugaggugauag

SEQ ID NO: 1661 - RNA, 21 nt, Artificial Sequence
  siRNA antisense strand against MASP2
cuuguguauaaugaggugaua

SEQ ID NO: 1662 - RNA, 21 nt, Artificial Sequence
  siRNA antisense strand against MASP2
ggcuuguguauaaugagguga

SEQ ID NO: 1663 - RNA, 21 nt, Artificial Sequence
  siRNA antisense strand against MASP2
aggcuuguguauaaugaggug

SEQ ID NO: 1664 - RNA, 21 nt, Artificial Sequence
  siRNA antisense strand against MASP2
caggcuuguguauaaugaggu

SEQ ID NO: 1665 - RNA, 21 nt, Artificial Sequence
  siRNA antisense strand against MASP2
ccaggcuuguguauaaugagg

SEQ ID NO: 1666 - RNA, 21 nt, Artificial Sequence
  siRNA antisense strand against MASP2
accaggcuuguguauaaugag

SEQ ID NO: 1667 - RNA, 21 nt, Artificial Sequence
  siRNA antisense strand against MASP2
gaccaggcuuguguauaauga

SEQ ID NO: 1668 - RNA, 21 nt, Artificial Sequence
  siRNA antisense strand against MASP2
agaccaggcuuguguauaaug

SEQ ID NO: 1669 - RNA, 21 nt, Artificial Sequence
  siRNA antisense strand against MASP2
cagaccaggcuuguguauaau

SEQ ID NO: 1670 - RNA, 21 nt, Artificial Sequence
  siRNA antisense strand against MASP2
ucagaccaggcuuguguauaa

SEQ ID NO: 1671 - RNA, 21 nt, Artificial Sequence
  siRNA antisense strand against MASP2
uucagaccaggcuuguguaua

SEQ ID NO: 1672 - RNA, 21 nt, Artificial Sequence
  siRNA antisense strand against MASP2
cuucagaccaggcuuguguau

SEQ ID NO: 1673 - RNA, 21 nt, Artificial Sequence
  siRNA antisense strand against MASP2
gcuucagaccaggcuugugua

SEQ ID NO: 1674 - RNA, 21 nt, Artificial Sequence
  siRNA antisense strand against MASP2
agcuucagaccaggcuugugu

SEQ ID NO: 1675 - RNA, 21 nt, Artificial Sequence
  siRNA antisense strand against MASP2
cagcuucagaccaggcuugug

SEQ ID NO: 1676 - RNA, 21 nt, Artificial Sequence
  siRNA antisense strand against MASP2
acagcuucagaccaggcuugu

SEQ ID NO: 1677 - RNA, 21 nt, Artificial Sequence
  siRNA antisense strand against MASP2
aacagcuucagaccaggcuug

SEQ ID NO: 1678 - RNA, 21 nt, Artificial Sequence
  siRNA antisense strand against MASP2
aaacagcuucagaccaggcuu

SEQ ID NO: 1679 - RNA, 21 nt, Artificial Sequence
  siRNA antisense strand against MASP2
aaaacagcuucagaccaggcu

SEQ ID NO: 1680 - RNA, 21 nt, Artificial Sequence
  siRNA antisense strand against MASP2
aaaaacagcuucagaccaggc

SEQ ID NO: 1681 - RNA, 21 nt, Artificial Sequence
  siRNA antisense strand against MASP2
uaaaaacagcuucagaccagg

SEQ ID NO: 1682 - RNA, 21 nt, Artificial Sequence
  siRNA antisense strand against MASP2
auaaaaacagcuucagaccag

SEQ ID NO: 1683 - RNA, 21 nt, Artificial Sequence
  siRNA antisense strand against MASP2
uauaaaaacagcuucagacca

SEQ ID NO: 1684 - RNA, 21 nt, Artificial Sequence
  siRNA antisense strand against MASP2
uguauaaaaacagcuucagac

SEQ ID NO: 1685 - RNA, 21 nt, Artificial Sequence
  siRNA antisense strand against MASP2
auguauaaaaacagcuucaga

SEQ ID NO: 1686 - RNA, 21 nt, Artificial Sequence
  siRNA antisense strand against MASP2
cauguauaaaaacagcuucag

SEQ ID NO: 1687 - RNA, 21 nt, Artificial Sequence
  siRNA antisense strand against MASP2
ucauguauaaaaacagcuuca

SEQ ID NO: 1688 - RNA, 21 nt, Artificial Sequence
  siRNA antisense strand against MASP2
auaaccuucauguauaaaaac

SEQ ID NO: 1689 - RNA, 21 nt, Artificial Sequence
  siRNA antisense strand against MASP2
aguauaaccuucauguauaaa

SEQ ID NO: 1690 - RNA, 21 nt, Artificial Sequence
  siRNA antisense strand against MASP2
augaguauaaccuucauguau

SEQ ID NO: 1691 - RNA, 21 nt, Artificial Sequence
  siRNA antisense strand against MASP2
aucaugaguauaaccuucaug

SEQ ID NO: 1692 - RNA, 21 nt, Artificial Sequence
  siRNA antisense strand against MASP2
caucaugaguauaaccuucau

SEQ ID NO: 1693 - RNA, 21 nt, Artificial Sequence
  siRNA antisense strand against MASP2
agcaucaugaguauaaccuuc

SEQ ID NO: 1694 - RNA, 21 nt, Artificial Sequence
  siRNA antisense strand against MASP2
ccagcaucaugaguauaaccu

SEQ ID NO: 1695 - RNA, 21 nt, Artificial Sequence
  siRNA antisense strand against MASP2
aaagccagcaucaugaguaua

SEQ ID NO: 1696 - RNA, 21 nt, Artificial Sequence
  siRNA antisense strand against MASP2
caaagccagcaucaugaguau

SEQ ID NO: 1697 - RNA, 21 nt, Artificial Sequence
  siRNA antisense strand against MASP2
ucaaagccagcaucaugagua

SEQ ID NO: 1698 - RNA, 21 nt, Artificial Sequence
  siRNA antisense strand against MASP2
gucaaagccagcaucaugagu

SEQ ID NO: 1699 - RNA, 21 nt, Artificial Sequence
  siRNA antisense strand against MASP2
ugucaaagccagcaucaugag

SEQ ID NO: 1700 - RNA, 21 nt, Artificial Sequence
  siRNA antisense strand against MASP2
uugucaaagccagcaucauga

SEQ ID NO: 1701 - RNA, 21 nt, Artificial Sequence
  siRNA antisense strand against MASP2
auugucaaagccagcaucaug

SEQ ID NO: 1702 - RNA, 21 nt, Artificial Sequence
  siRNA antisense strand against MASP2
cauugucaaagccagcaucau

SEQ ID NO: 1703 - RNA, 21 nt, Artificial Sequence
  siRNA antisense strand against MASP2
ucauugucaaagccagcauca

SEQ ID NO: 1704 - RNA, 21 nt, Artificial Sequence
  siRNA antisense strand against MASP2
ugucauugucaaagccagcau

SEQ ID NO: 1705 - RNA, 21 nt, Artificial Sequence
  siRNA antisense strand against MASP2
augucauugucaaagccagca

SEQ ID NO: 1706 - RNA, 21 nt, Artificial Sequence
  siRNA antisense strand against MASP2
uaugucauugucaaagccagc

SEQ ID NO: 1707 - RNA, 21 nt, Artificial Sequence
  siRNA antisense strand against MASP2
cuaugucauugucaaagccag

SEQ ID NO: 1708 - RNA, 21 nt, Artificial Sequence
  siRNA antisense strand against MASP2
gcuaugucauugucaaagcca

SEQ ID NO: 1709 - RNA, 21 nt, Artificial Sequence
  siRNA antisense strand against MASP2
ugcuaugucauugucaaagcc

SEQ ID NO: 1710 - RNA, 21 nt, Artificial Sequence
  siRNA antisense strand against MASP2
agugcuaugucauugucaaag

SEQ ID NO: 1711 - RNA, 21 nt, Artificial Sequence
  siRNA antisense strand against MASP2
ucagugcuaugucauugucaa

SEQ ID NO: 1712 - RNA, 21 nt, Artificial Sequence
  siRNA antisense strand against MASP2
aucagugcuaugucauuguca

SEQ ID NO: 1713 - RNA, 21 nt, Artificial Sequence
  siRNA antisense strand against MASP2
aaucagugcuaugucauuguc

SEQ ID NO: 1714 - RNA, 21 nt, Artificial Sequence
  siRNA antisense strand against MASP2
uaaucagugcuaugucauugu

SEQ ID NO: 1715 - RNA, 21 nt, Artificial Sequence
  siRNA antisense strand against MASP2
uuaaucagugcuaugucauug

SEQ ID NO: 1716 - RNA, 21 nt, Artificial Sequence
  siRNA antisense strand against MASP2
uuuaaucagugcuaugucauu

SEQ ID NO: 1717 - RNA, 21 nt, Artificial Sequence
  siRNA antisense strand against MASP2
auuuaaucagugcuaugucau

SEQ ID NO: 1718 - RNA, 21 nt, Artificial Sequence
  siRNA antisense strand against MASP2
aauuuaaucagugcuauguca

SEQ ID NO: 1719 - RNA, 21 nt, Artificial Sequence
  siRNA antisense strand against MASP2
caauuuaaucagugcuauguc

SEQ ID NO: 1720 - RNA, 21 nt, Artificial Sequence
  siRNA antisense strand against MASP2
ucaauuuaaucagugcuaugu

SEQ ID NO: 1721 - RNA, 21 nt, Artificial Sequence
  siRNA antisense strand against MASP2
uucaauuuaaucagugcuaug

SEQ ID NO: 1722 - RNA, 21 nt, Artificial Sequence
  siRNA antisense strand against MASP2
auucaauuuaaucagugcuau

SEQ ID NO: 1723 - RNA, 21 nt, Artificial Sequence
  siRNA antisense strand against MASP2
uauucaauuuaaucagugcua

SEQ ID NO: 1724 - RNA, 21 nt, Artificial Sequence
  siRNA antisense strand against MASP2
uuauucaauuuaaucagugcu

SEQ ID NO: 1725 - RNA, 21 nt, Artificial Sequence
  siRNA antisense strand against MASP2
uguuauucaauuuaaucagug

SEQ ID NO: 1726 - RNA, 21 nt, Artificial Sequence
  siRNA antisense strand against MASP2
uuguuauucaauuuaaucagu

SEQ ID NO: 1727 - RNA, 21 nt, Artificial Sequence
  siRNA antisense strand against MASP2
uuuguuauucaauuuaaucag

SEQ ID NO: 1728 - RNA, 21 nt, Artificial Sequence
  siRNA antisense strand against MASP2
acaacuuuguuauucaauuua

SEQ ID NO: 1729 - RNA, 21 nt, Artificial Sequence
  siRNA antisense strand against MASP2
ugauuacaacuuuguuauuca

SEQ ID NO: 1730 - RNA, 21 nt, Artificial Sequence
  siRNA antisense strand against MASP2
uugauuacaacuuuguuauuc

SEQ ID NO: 1731 - RNA, 21 nt, Artificial Sequence
  siRNA antisense strand against MASP2
auugauuacaacuuuguuauu

SEQ ID NO: 1732 - RNA, 21 nt, Artificial Sequence
  siRNA antisense strand against MASP2
uauugauuacaacuuuguuau

SEQ ID NO: 1733 - RNA, 21 nt, Artificial Sequence
  siRNA antisense strand against MASP2
uugcuauugauuacaacuuug

SEQ ID NO: 1734 - RNA, 21 nt, Artificial Sequence
  siRNA antisense strand against MASP2
uguugcuauugauuacaacuu

SEQ ID NO: 1735 - RNA, 21 nt, Artificial Sequence
  siRNA antisense strand against MASP2
ugauguugcuauugauuacaa

SEQ ID NO: 1736 - RNA, 21 nt, Artificial Sequence
  siRNA antisense strand against MASP2
cgugauguugcuauugauuac

SEQ ID NO: 1737 - RNA, 21 nt, Artificial Sequence
  siRNA antisense strand against MASP2
uuucuuggcagacaaauaggc

SEQ ID NO: 1738 - RNA, 21 nt, Artificial Sequence
  siRNA antisense strand against MASP2
uuuucuuggcagacaaauagg

SEQ ID NO: 1739 - RNA, 21 nt, Artificial Sequence
  siRNA antisense strand against MASP2
cuuuucuuggcagacaaauag

SEQ ID NO: 1740 - RNA, 21 nt, Artificial Sequence
  siRNA antisense strand against MASP2
ucagcuucuuuucuuggcaga

SEQ ID NO: 1741 - RNA, 21 nt, Artificial Sequence
  siRNA antisense strand against MASP2
auucagcuucuuuucuuggca

SEQ ID NO: 1742 - RNA, 21 nt, Artificial Sequence
  siRNA antisense strand against MASP2
ucauaaaggauucagcuucuu

SEQ ID NO: 1743 - RNA, 21 nt, Artificial Sequence
  siRNA antisense strand against MASP2
uccucauaaaggauucagcuu

SEQ ID NO: 1744 - RNA, 21 nt, Artificial Sequence
  siRNA antisense strand against MASP2
guccucauaaaggauucagcu

SEQ ID NO: 1745 - RNA, 21 nt, Artificial Sequence
  siRNA antisense strand against MASP2
uuccaaugucaucuguccuca

SEQ ID NO: 1746 - RNA, 21 nt, Artificial Sequence
  siRNA antisense strand against MASP2
guuccaaugucaucuguccuc

SEQ ID NO: 1747 - RNA, 21 nt, Artificial Sequence
  siRNA antisense strand against MASP2
uccagaugcaguuccaauguc

SEQ ID NO: 1748 - RNA, 21 nt, Artificial Sequence
  siRNA antisense strand against MASP2
uccccauccagaugcaguucc

SEQ ID NO: 1749 - RNA, 21 nt, Artificial Sequence
  siRNA antisense strand against MASP2
aauccccauccagaugcaguu

SEQ ID NO: 1750 - RNA, 21 nt, Artificial Sequence
  siRNA antisense strand against MASP2
uuuggguuaauccccauccag

SEQ ID NO: 1751 - RNA, 21 nt, Artificial Sequence
  siRNA antisense strand against MASP2
uuucuagcaagaaaaccccuu

SEQ ID NO: 1752 - RNA, 21 nt, Artificial Sequence
  siRNA antisense strand against MASP2
auuucuagcaagaaaaccccu

SEQ ID NO: 1753 - RNA, 21 nt, Artificial Sequence
  siRNA antisense strand against MASP2
gauuucuagcaagaaaacccc

SEQ ID NO: 1754 - RNA, 21 nt, Artificial Sequence
  siRNA antisense strand against MASP2
agauuucuagcaagaaaaccc

SEQ ID NO: 1755 - RNA, 21 nt, Artificial Sequence
  siRNA antisense strand against MASP2
uagauuucuagcaagaaaacc

SEQ ID NO: 1756 - RNA, 21 nt, Artificial Sequence
  siRNA antisense strand against MASP2
uuagauuucuagcaagaaaac

SEQ ID NO: 1757 - RNA, 21 nt, Artificial Sequence
  siRNA antisense strand against MASP2
acauuagauuucuagcaagaa

SEQ ID NO: 1758 - RNA, 21 nt, Artificial Sequence
  siRNA antisense strand against MASP2
uacauuagauuucuagcaaga

SEQ ID NO: 1759 - RNA, 21 nt, Artificial Sequence
  siRNA antisense strand against MASP2
auacauuagauuucuagcaag

SEQ ID NO: 1760 - RNA, 21 nt, Artificial Sequence
  siRNA antisense strand against MASP2
augucgacauacauuagauuu

SEQ ID NO: 1761 - RNA, 21 nt, Artificial Sequence
  siRNA antisense strand against MASP2
uaugucgacauacauuagauu

SEQ ID NO: 1762 - RNA, 21 nt, Artificial Sequence
  siRNA antisense strand against MASP2
gguaugucgacauacauuaga

SEQ ID NO: 1763 - RNA, 21 nt, Artificial Sequence
  siRNA antisense strand against MASP2
ucgguaugucgacauacauua

SEQ ID NO: 1764 - RNA, 21 nt, Artificial Sequence
  siRNA antisense strand against MASP2
aucgguaugucgacauacauu

SEQ ID NO: 1765 - RNA, 21 nt, Artificial Sequence
  siRNA antisense strand against MASP2
acaaucgguaugucgacauac

SEQ ID NO: 1766 - RNA, 21 nt, Artificial Sequence
  siRNA antisense strand against MASP2
aacaaucgguaugucgacaua

SEQ ID NO: 1767 - RNA, 21 nt, Artificial Sequence
  siRNA antisense strand against MASP2
uuugauggucaacaaucggua

SEQ ID NO: 1768 - RNA, 21 nt, Artificial Sequence
  siRNA antisense strand against MASP2
uuuugauggucaacaaucggu

SEQ ID NO: 1769 - RNA, 21 nt, Artificial Sequence
  siRNA antisense strand against MASP2
uuuuugauggucaacaaucgg

SEQ ID NO: 1770 - RNA, 21 nt, Artificial Sequence
  siRNA antisense strand against MASP2
acauuuuugauggucaacaau

SEQ ID NO: 1771 - RNA, 21 nt, Artificial Sequence
  siRNA antisense strand against MASP2
uacauuuuugauggucaacaa

SEQ ID NO: 1772 - RNA, 21 nt, Artificial Sequence
  siRNA antisense strand against MASP2
guacauuuuugauggucaaca

SEQ ID NO: 1773 - RNA, 21 nt, Artificial Sequence
  siRNA antisense strand against MASP2
auaugcagcaguacauuuuug

SEQ ID NO: 1774 - RNA, 21 nt, Artificial Sequence
  siRNA antisense strand against MASP2
uuucauaugcagcaguacauu

SEQ ID NO: 1775 - RNA, 21 nt, Artificial Sequence
  siRNA antisense strand against MASP2
ggcuuuucauaugcagcagua

SEQ ID NO: 1776 - RNA, 21 nt, Artificial Sequence
  siRNA antisense strand against MASP2
uggcuuuucauaugcagcagu

SEQ ID NO: 1777 - RNA, 21 nt, Artificial Sequence
  siRNA antisense strand against MASP2
guggcuuuucauaugcagcag

SEQ ID NO: 1778 - RNA, 21 nt, Artificial Sequence
  siRNA antisense strand against MASP2
uaggguggcuuuucauaugca

SEQ ID NO: 1779 - RNA, 21 nt, Artificial Sequence
  siRNA antisense strand against MASP2
uuccccuuggauaggguggcu

SEQ ID NO: 1780 - RNA, 21 nt, Artificial Sequence
  siRNA antisense strand against MASP2
uuacacuuccccuuggauagg

SEQ ID NO: 1781 - RNA, 21 nt, Artificial Sequence
  siRNA antisense strand against MASP2
aguuacacuuccccuuggaua

SEQ ID NO: 1782 - RNA, 21 nt, Artificial Sequence
  siRNA antisense strand against MASP2
cauguuagcaguuacacuucc

SEQ ID NO: 1783 - RNA, 21 nt, Artificial Sequence
  siRNA antisense strand against MASP2
agcauguuagcaguuacacuu

SEQ ID NO: 1784 - RNA, 21 nt, Artificial Sequence
  siRNA antisense strand against MASP2
gcacaaagcauguuagcaguu

SEQ ID NO: 1785 - RNA, 21 nt, Artificial Sequence
  siRNA antisense strand against MASP2
agcacaaagcauguuagcagu

SEQ ID NO: 1786 - RNA, 21 nt, Artificial Sequence
  siRNA antisense strand against MASP2
uaagccagcacaaagcauguu

SEQ ID NO: 1787 - RNA, 21 nt, Artificial Sequence
  siRNA antisense strand against MASP2
ucuaagccagcacaaagcaug

SEQ ID NO: 1788 - RNA, 21 nt, Artificial Sequence
  siRNA antisense strand against MASP2
uucuaagccagcacaaagcau

SEQ ID NO: 1789 - RNA, 21 nt, Artificial Sequence
  siRNA antisense strand against MASP2
ucaccucugcagcuguccuug

SEQ ID NO: 1790 - RNA, 21 nt, Artificial Sequence
  siRNA antisense strand against MASP2
cuccgcugucaccucugcagc

SEQ ID NO: 1791 - RNA, 21 nt, Artificial Sequence
  siRNA antisense strand against MASP2
ucuagaaacaccagugccccu

SEQ ID NO: 1792 - RNA, 21 nt, Artificial Sequence
  siRNA antisense strand against MASP2
uaucuagaaacaccagugccc

SEQ ID NO: 1793 - RNA, 21 nt, Artificial Sequence
  siRNA antisense strand against MASP2
ucacuaucuagaaacaccagu

SEQ ID NO: 1794 - RNA, 21 nt, Artificial Sequence
  siRNA antisense strand against MASP2
uguuucacuaucuagaaacac

SEQ ID NO: 1795 - RNA, 21 nt, Artificial Sequence
  siRNA antisense strand against MASP2
aaccaccucucuguuucacua

SEQ ID NO: 1796 - RNA, 21 nt, Artificial Sequence
  siRNA antisense strand against MASP2
caaaccaccucucuguuucac

SEQ ID NO: 1797 - RNA, 21 nt, Artificial Sequence
  siRNA antisense strand against MASP2
cucccacaaaccaccucucug

SEQ ID NO: 1798 - RNA, 21 nt, Artificial Sequence
  siRNA antisense strand against MASP2
auuccucccacaaaccaccuc

SEQ ID NO: 1799 - RNA, 21 nt, Artificial Sequence
  siRNA antisense strand against MASP2
ccccaggacacuauuccuccc

SEQ ID NO: 1800 - RNA, 21 nt, Artificial Sequence
  siRNA antisense strand against MASP2
accccaggacacuauuccucc

SEQ ID NO: 1801 - RNA, 21 nt, Artificial Sequence
  siRNA antisense strand against MASP2
auggaaccccaggacacuauu

SEQ ID NO: 1802 - RNA, 21 nt, Artificial Sequence
  siRNA antisense strand against MASP2
cccacaauucauggaacccca

SEQ ID NO: 1803 - RNA, 21 nt, Artificial Sequence
  siRNA antisense strand against MASP2
ugcuuccccacaauucaugga

SEQ ID NO: 1804 - RNA, 21 nt, Artificial Sequence
  siRNA antisense strand against MASP2
acugaccugcuuccccacaau

SEQ ID NO: 1805 - RNA, 21 nt, Artificial Sequence
  siRNA antisense strand against MASP2
agacuccauacugaccugcuu

SEQ ID NO: 1806 - RNA, 21 nt, Artificial Sequence
  siRNA antisense strand against MASP2
uagacuccauacugaccugcu

SEQ ID NO: 1807 - RNA, 21 nt, Artificial Sequence
  siRNA antisense strand against MASP2
guagacuccauacugaccugc

SEQ ID NO: 1808 - RNA, 21 nt, Artificial Sequence
  siRNA antisense strand against MASP2
uguagacuccauacugaccug

SEQ ID NO: 1809 - RNA, 21 nt, Artificial Sequence
  siRNA antisense strand against MASP2
uguguagacuccauacugacc

SEQ ID NO: 1810 - RNA, 21 nt, Artificial Sequence
  siRNA antisense strand against MASP2
uuguguagacuccauacugac

SEQ ID NO: 1811 - RNA, 21 nt, Artificial Sequence
  siRNA antisense strand against MASP2
uuuguguagacuccauacuga

SEQ ID NO: 1812 - RNA, 21 nt, Artificial Sequence
  siRNA antisense strand against MASP2
cuuuuguguagacuccauacu

SEQ ID NO: 1813 - RNA, 21 nt, Artificial Sequence
  siRNA antisense strand against MASP2
uaacuuuuguguagacuccau

SEQ ID NO: 1814 - RNA, 21 nt, Artificial Sequence
  siRNA antisense strand against MASP2
auaacuuuuguguagacucca

SEQ ID NO: 1815 - RNA, 21 nt, Artificial Sequence
  siRNA antisense strand against MASP2
guuaauaacuuuuguguagac

SEQ ID NO: 1816 - RNA, 21 nt, Artificial Sequence
  siRNA antisense strand against MASP2
cagggaauauaguuaauaacu

SEQ ID NO: 1817 - RNA, 21 nt, Artificial Sequence
  siRNA antisense strand against MASP2
cucgauccagggaauauaguu

SEQ ID NO: 1818 - RNA, 21 nt, Artificial Sequence
  siRNA antisense strand against MASP2
uucucgauccagggaauauag

SEQ ID NO: 1819 - RNA, 21 nt, Artificial Sequence
  siRNA antisense strand against MASP2
uuauguucucgauccagggaa

SEQ ID NO: 1820 - RNA, 21 nt, Artificial Sequence
  siRNA antisense strand against MASP2
aauuauguucucgauccaggg

SEQ ID NO: 1821 - RNA, 21 nt, Artificial Sequence
  siRNA antisense strand against MASP2
acuaauuauguucucgaucca

SEQ ID NO: 1822 - RNA, 21 nt, Artificial Sequence
  siRNA antisense strand against MASP2
ucacuaauuauguucucgauc

SEQ ID NO: 1823 - RNA, 21 nt, Artificial Sequence
  siRNA antisense strand against MASP2
aucacuaauuauguucucgau

SEQ ID NO: 1824 - RNA, 21 nt, Artificial Sequence
  siRNA antisense strand against MASP2
uaaaaaucacuaauuauguuc

SEQ ID NO: 1825 - RNA, 21 nt, Artificial Sequence
  siRNA antisense strand against MASP2
uuaaaaaucacuaauuauguu

SEQ ID NO: 1826 - RNA, 21 nt, Artificial Sequence
  siRNA antisense strand against MASP2
guuaaaaaucacuaauuaugu

SEQ ID NO: 1827 - RNA, 21 nt, Artificial Sequence
  siRNA antisense strand against MASP2
uugacugcagacacgcaaguu

SEQ ID NO: 1828 - RNA, 21 nt, Artificial Sequence
  siRNA antisense strand against MASP2
uccuugacugcagacacgcaa

SEQ ID NO: 1829 - RNA, 21 nt, Artificial Sequence
  siRNA antisense strand against MASP2
gaagaauccuugacugcagac

SEQ ID NO: 1830 - RNA, 21 nt, Artificial Sequence
  siRNA antisense strand against MASP2
augaagaauccuugacugcag

SEQ ID NO: 1831 - RNA, 21 nt, Artificial Sequence
  siRNA antisense strand against MASP2
aaaaugaagaauccuugacug

SEQ ID NO: 1832 - RNA, 21 nt, Artificial Sequence
  siRNA antisense strand against MASP2
uaaaaaugaagaauccuugac

SEQ ID NO: 1833 - RNA, 21 nt, Artificial Sequence
  siRNA antisense strand against MASP2
auuucuaaaaaugaagaaucc

SEQ ID NO: 1834 - RNA, 21 nt, Artificial Sequence
  siRNA antisense strand against MASP2
ccacgucgcugccaaggucuu

SEQ ID NO: 1835 - RNA, 21 nt, Artificial Sequence
  siRNA antisense strand against MASP2
cuucucgagccacgucgcugc

SEQ ID NO: 1836 - RNA, 21 nt, Artificial Sequence
  siRNA antisense strand against MASP2
ugaugaaugcuucucgagcca

SEQ ID NO: 1837 - RNA, 21 nt, Artificial Sequence
  siRNA antisense strand against MASP2
ccacaguaaugaugaaugcuu

SEQ ID NO: 1838 - RNA, 21 nt, Artificial Sequence
  siRNA antisense strand against MASP2
uccacaguaaugaugaaugcu

SEQ ID NO: 1839 - RNA, 21 nt, Artificial Sequence
  siRNA antisense strand against MASP2
cauguccacaguaaugaugaa

SEQ ID NO: 1840 - RNA, 21 nt, Artificial Sequence
  siRNA antisense strand against MASP2
ccauguccacaguaaugauga

SEQ ID NO: 1841 - RNA, 21 nt, Artificial Sequence
  siRNA antisense strand against MASP2
ugccauguccacaguaaugau

SEQ ID NO: 1842 - RNA, 21 nt, Artificial Sequence
  siRNA antisense strand against MASP2
uuuggguggagcaacaacugc

SEQ ID NO: 1843 - RNA, 21 nt, Artificial Sequence
  siRNA antisense strand against MASP2
gacagcagccucaccuggagu

SEQ ID NO: 1844 - RNA, 21 nt, Artificial Sequence
  siRNA antisense strand against MASP2
gaaaugacagcagccucaccu

SEQ ID NO: 1845 - RNA, 21 nt, Artificial Sequence
  siRNA antisense strand against MASP2
aguggagaaaugacagcagcc

SEQ ID NO: 1846 - RNA, 21 nt, Artificial Sequence
  siRNA antisense strand against MASP2
gcaaguggagaaaugacagca

SEQ ID NO: 1847 - RNA, 21 nt, Artificial Sequence
  siRNA antisense strand against MASP2
acuggcaaguggagaaaugac

SEQ ID NO: 1848 - RNA, 21 nt, Artificial Sequence
  siRNA antisense strand against MASP2
uuaaacuggcaaguggagaaa

SEQ ID NO: 1849 - RNA, 21 nt, Artificial Sequence
  siRNA antisense strand against MASP2
auuaaacuggcaaguggagaa

SEQ ID NO: 1850 - RNA, 21 nt, Artificial Sequence
  siRNA antisense strand against MASP2
gguaaggcuggaauuaaacug

SEQ ID NO: 1851 - RNA, 21 nt, Artificial Sequence
  siRNA antisense strand against MASP2
ucaauggguaaggcuggaauu

SEQ ID NO: 1852 - RNA, 21 nt, Artificial Sequence
  siRNA antisense strand against MASP2
auguccccuugagucaauggg

SEQ ID NO: 1853 - RNA, 21 nt, Artificial Sequence
  siRNA antisense strand against MASP2
uauguccccuugagucaaugg

SEQ ID NO: 1854 - RNA, 21 nt, Artificial Sequence
  siRNA antisense strand against MASP2
ucgugguuuauguccccuuga

SEQ ID NO: 1855 - RNA, 21 nt, Artificial Sequence
  siRNA antisense strand against MASP2
ucucgugguuuauguccccuu

SEQ ID NO: 1856 - RNA, 21 nt, Artificial Sequence
  siRNA antisense strand against MASP2
acucucgugguuuaugucccc

SEQ ID NO: 1857 - RNA, 21 nt, Artificial Sequence
  siRNA antisense strand against MASP2
cacucucgugguuuauguccc

SEQ ID NO: 1858 - RNA, 21 nt, Artificial Sequence
  siRNA antisense strand against MASP2
gucacucucgugguuuauguc

SEQ ID NO: 1859 - RNA, 21 nt, Artificial Sequence
  siRNA antisense strand against MASP2
ugucacucucgugguuuaugu

SEQ ID NO: 1860 - RNA, 21 nt, Artificial Sequence
  siRNA antisense strand against MASP2
augacugucacucucgugguu

SEQ ID NO: 1861 - RNA, 21 nt, Artificial Sequence
  siRNA antisense strand against MASP2
aagaugacugucacucucgug

SEQ ID NO: 1862 - RNA, 21 nt, Artificial Sequence
  siRNA antisense strand against MASP2
acacugggugggcaaagauga

SEQ ID NO: 1863 - RNA, 21 nt, Artificial Sequence
  siRNA antisense strand against MASP2
uuacacugggugggcaaagau

SEQ ID NO: 1864 - RNA, 21 nt, Artificial Sequence
  siRNA antisense strand against MASP2
acauuacacugggugggcaaa

SEQ ID NO: 1865 - RNA, 21 nt, Artificial Sequence
  siRNA antisense strand against MASP2
gacauuacacugggugggcaa

SEQ ID NO: 1866 - RNA, 21 nt, Artificial Sequence
  siRNA antisense strand against MASP2
gugacauuacacugggugggc

SEQ ID NO: 1867 - RNA, 21 nt, Artificial Sequence
  siRNA antisense strand against MASP2
cagugacauuacacugggugg

SEQ ID NO: 1868 - RNA, 21 nt, Artificial Sequence
  siRNA antisense strand against MASP2
gcagugacauuacacugggug

SEQ ID NO: 1869 - RNA, 21 nt, Artificial Sequence
  siRNA antisense strand against MASP2
agcagugacauuacacugggu

SEQ ID NO: 1870 - RNA, 21 nt, Artificial Sequence
  siRNA antisense strand against MASP2
aaugaaauguaauuugagcag

SEQ ID NO: 1871 - RNA, 21 nt, Artificial Sequence
  siRNA antisense strand against MASP2
aagguaaugaaauguaauuug

SEQ ID NO: 1872 - RNA, 21 nt, Artificial Sequence
  siRNA antisense strand against MASP2
uaagguaaugaaauguaauuu

SEQ ID NO: 1873 - RNA, 21 nt, Artificial Sequence
  siRNA antisense strand against MASP2
uuuuaagguaaugaaauguaa

SEQ ID NO: 1874 - RNA, 21 nt, Artificial Sequence
  siRNA antisense strand against MASP2
uuuuuaagguaaugaaaugua

SEQ ID NO: 1875 - RNA, 21 nt, Artificial Sequence
  siRNA antisense strand against MASP2
uggcuuuuuaagguaaugaaa

SEQ ID NO: 1876 - RNA, 21 nt, Artificial Sequence
  siRNA antisense strand against MASP2
uuacagaaaugccaacagcca

SEQ ID NO: 1877 - RNA, 21 nt, Artificial Sequence
  siRNA antisense strand against MASP2
uuuacagaaaugccaacagcc

SEQ ID NO: 1878 - RNA, 21 nt, Artificial Sequence
  siRNA antisense strand against MASP2
aguuuacagaaaugccaacag

SEQ ID NO: 1879 - RNA, 21 nt, Artificial Sequence
  siRNA antisense strand against MASP2
cauggacaggcaguuuacaga

SEQ ID NO: 1880 - RNA, 21 nt, Artificial Sequence
  siRNA antisense strand against MASP2
gcauggacaggcaguuuacag

SEQ ID NO: 1881 - RNA, 21 nt, Artificial Sequence
  siRNA antisense strand against MASP2
agcauggacaggcaguuuaca

SEQ ID NO: 1882 - RNA, 21 nt, Artificial Sequence
  siRNA antisense strand against MASP2
aaaacaaagagcauggacagg

SEQ ID NO: 1883 - RNA, 21 nt, Artificial Sequence
  siRNA antisense strand against MASP2
uuuaaaaacaaagagcaugga

SEQ ID NO: 1884 - RNA, 21 nt, Artificial Sequence
  siRNA antisense strand against MASP2
acaaguuuaaaaacaaagagc

SEQ ID NO: 1885 - RNA, 19 nt, Homo sapiens
caggccaggccagcuggac

SEQ ID NO: 1886 - RNA, 19 nt, Homo sapiens
gccaggccagcuggacggg

SEQ ID NO: 1887 - RNA, 19 nt, Homo sapiens
caggccagcuggacgggca

SEQ ID NO: 1888 - RNA, 19 nt, Homo sapiens
aggccagcuggacgggcac

SEQ ID NO: 1889 - RNA, 19 nt, Homo sapiens
ggccagcuggacgggcaca

SEQ ID NO: 1890 - RNA, 19 nt, Homo sapiens
cagcuggacgggcacacca

SEQ ID NO: 1891 - RNA, 19 nt, Homo sapiens
agcuggacgggcacaccau

SEQ ID NO: 1892 - RNA, 19 nt, Homo sapiens
cuggacgggcacaccauga

SEQ ID NO: 1893 - RNA, 19 nt, Homo sapiens
ggacgggcacaccaugagg

SEQ ID NO: 1894 - RNA, 19 nt, Homo sapiens
acgggcacaccaugaggcu

SEQ ID NO: 1895 - RNA, 19 nt, Homo sapiens
cgggcacaccaugaggcug

SEQ ID NO: 1896 - RNA, 19 nt, Homo sapiens
gggcacaccaugaggcugc

SEQ ID NO: 1897 - RNA, 19 nt, Homo sapiens
ggcacaccaugaggcugcu

SEQ ID NO: 1898 - RNA, 19 nt, Homo sapiens
ccaugaggcugcugacccu

SEQ ID NO: 1899 - RNA, 19 nt, Homo sapiens
caugaggcugcugacccuc

SEQ ID NO: 1900 - RNA, 19 nt, Homo sapiens
gaggcugcugacccuccug

SEQ ID NO: 1901 - RNA, 19 nt, Homo sapiens
ggcugcugacccuccuggg

SEQ ID NO: 1902 - RNA, 19 nt, Homo sapiens
gcugcugacccuccugggc

SEQ ID NO: 1903 - RNA, 19 nt, Homo sapiens
cugcugacccuccugggcc

SEQ ID NO: 1904 - RNA, 19 nt, Homo sapiens
ugcugacccuccugggccu

SEQ ID NO: 1905 - RNA, 19 nt, Homo sapiens
cugacccuccugggccuuc

SEQ ID NO: 1906 - RNA, 19 nt, Homo sapiens
ugacccuccugggccuucu

SEQ ID NO: 1907 - RNA, 19 nt, Homo sapiens
cccuccugggccuucugug

SEQ ID NO: 1908 - RNA, 19 nt, Homo sapiens
ccuccugggccuucugugu

SEQ ID NO: 1909 - RNA, 19 nt, Homo sapiens
cugggccuucuguguggcu

SEQ ID NO: 1910 - RNA, 19 nt, Homo sapiens
gggccuucuguguggcucg

SEQ ID NO: 1911 - RNA, 19 nt, Homo sapiens
ggccuucuguguggcucgg

SEQ ID NO: 1912 - RNA, 19 nt, Homo sapiens
ccuucuguguggcucggug

SEQ ID NO: 1913 - RNA, 19 nt, Homo sapiens
cuucuguguggcucggugg

SEQ ID NO: 1914 - RNA, 19 nt, Homo sapiens
cuguguggcucgguggcca

SEQ ID NO: 1915 - RNA, 19 nt, Homo sapiens
guguggcucgguggccacc

SEQ ID NO: 1916 - RNA, 19 nt, Homo sapiens
gcucgguggccacccccuu

SEQ ID NO: 1917 - RNA, 19 nt, Homo sapiens
cucgguggccacccccuug

SEQ ID NO: 1918 - RNA, 19 nt, Homo sapiens
ccacccccuugggcccgaa

SEQ ID NO: 1919 - RNA, 19 nt, Homo sapiens
cccccuugggcccgaagug

SEQ ID NO: 1920 - RNA, 19 nt, Homo sapiens
ggcccgaaguggccugaac

SEQ ID NO: 1921 - RNA, 19 nt, Homo sapiens
gcccgaaguggccugaacc

SEQ ID NO: 1922 - RNA, 19 nt, Homo sapiens
cccgaaguggccugaaccu

SEQ ID NO: 1923 - RNA, 19 nt, Homo sapiens
ccgaaguggccugaaccug

SEQ ID NO: 1924 - RNA, 19 nt, Homo sapiens
cgaaguggccugaaccugu

SEQ ID NO: 1925 - RNA, 19 nt, Homo sapiens
aaguggccugaaccugugu

SEQ ID NO: 1926 - RNA, 19 nt, Homo sapiens
aguggccugaaccuguguu

SEQ ID NO: 1927 - RNA, 19 nt, Homo sapiens
guggccugaaccuguguuc

SEQ ID NO: 1928 - RNA, 19 nt, Homo sapiens
uggccugaaccuguguucg

SEQ ID NO: 1929 - RNA, 19 nt, Homo sapiens
ggccugaaccuguguucgg

SEQ ID NO: 1930 - RNA, 19 nt, Homo sapiens
gccugaaccuguguucggg

SEQ ID NO: 1931 - RNA, 19 nt, Homo sapiens
ccugaaccuguguucgggc

SEQ ID NO: 1932 - RNA, 19 nt, Homo sapiens
gaaccuguguucgggcgcc

SEQ ID NO: 1933 - RNA, 19 nt, Homo sapiens
accuguguucgggcgccug

SEQ ID NO: 1934 - RNA, 19 nt, Homo sapiens
guguucgggcgccuggcau

SEQ ID NO: 1935 - RNA, 19 nt, Homo sapiens
ccuggcaucccccggcuuu

SEQ ID NO: 1936 - RNA, 19 nt, Homo sapiens
cuggcaucccccggcuuuc

SEQ ID NO: 1937 - RNA, 19 nt, Homo sapiens
ccggcuuuccaggggagua

SEQ ID NO: 1938 - RNA, 19 nt, Homo sapiens
cggcuuuccaggggaguau

SEQ ID NO: 1939 - RNA, 19 nt, Homo sapiens
ggcuuuccaggggaguaug

SEQ ID NO: 1940 - RNA, 19 nt, Homo sapiens
uuuccaggggaguaugcca

SEQ ID NO: 1941 - RNA, 19 nt, Homo sapiens
caggggaguaugccaauga

SEQ ID NO: 1942 - RNA, 19 nt, Homo sapiens
aggggaguaugccaaugac

SEQ ID NO: 1943 - RNA, 19 nt, Homo sapiens
ggggaguaugccaaugacc

SEQ ID NO: 1944 - RNA, 19 nt, Homo sapiens
gggaguaugccaaugacca

SEQ ID NO: 1945 - RNA, 19 nt, Homo sapiens
ggaguaugccaaugaccag

SEQ ID NO: 1946 - RNA, 19 nt, Homo sapiens
gaguaugccaaugaccagg

SEQ ID NO: 1947 - RNA, 19 nt, Homo sapiens
gccaaugaccaggagcggc

SEQ ID NO: 1948 - RNA, 19 nt, Homo sapiens
ccaaugaccaggagcggcg

SEQ ID NO: 1949 - RNA, 19 nt, Homo sapiens
caaugaccaggagcggcgc

SEQ ID NO: 1950 - RNA, 19 nt, Homo sapiens
augaccaggagcggcgcug

SEQ ID NO: 1951 - RNA, 19 nt, Homo sapiens
accaggagcggcgcuggac

SEQ ID NO: 1952 - RNA, 19 nt, Homo sapiens
ggagcggcgcuggacccug

SEQ ID NO: 1953 - RNA, 19 nt, Homo sapiens
gagcggcgcuggacccuga

SEQ ID NO: 1954 - RNA, 19 nt, Homo sapiens
agcggcgcuggacccugac

SEQ ID NO: 1955 - RNA, 19 nt, Homo sapiens
gcggcgcuggacccugacu

SEQ ID NO: 1956 - RNA, 19 nt, Homo sapiens
cggcgcuggacccugacug

SEQ ID NO: 1957 - RNA, 19 nt, Homo sapiens
ggcgcuggacccugacugc

SEQ ID NO: 1958 - RNA, 19 nt, Homo sapiens
gcgcuggacccugacugca

SEQ ID NO: 1959 - RNA, 19 nt, Homo sapiens
cgcuggacccugacugcac

SEQ ID NO: 1960 - RNA, 19 nt, Homo sapiens
gcuggacccugacugcacc

SEQ ID NO: 1961 - RNA, 19 nt, Homo sapiens
ggacccugacugcaccccc

SEQ ID NO: 1962 - RNA, 19 nt, Homo sapiens
gacccugacugcacccccc

SEQ ID NO: 1963 - RNA, 19 nt, Homo sapiens
gacugcaccccccggcuac

SEQ ID NO: 1964 - RNA, 19 nt, Homo sapiens
ccggcuaccgccugcgccu

SEQ ID NO: 1965 - RNA, 19 nt, Homo sapiens
ggcuaccgccugcgccucu

SEQ ID NO: 1966 - RNA, 19 nt, Homo sapiens
gcuaccgccugcgccucua

SEQ ID NO: 1967 - RNA, 19 nt, Homo sapiens
cuaccgccugcgccucuac

SEQ ID NO: 1968 - RNA, 19 nt, Homo sapiens
accgccugcgccucuacuu

SEQ ID NO: 1969 - RNA, 19 nt, Homo sapiens
ccgccugcgccucuacuuc

SEQ ID NO: 1970 - RNA, 19 nt, Homo sapiens
cgccugcgccucuacuuca

SEQ ID NO: 1971 - RNA, 19 nt, Homo sapiens
gccugcgccucuacuucac

SEQ ID NO: 1972 - RNA, 19 nt, Homo sapiens
ccugcgccucuacuucacc

SEQ ID NO: 1973 - RNA, 19 nt, Homo sapiens
cugcgccucuacuucaccc

SEQ ID NO: 1974 - RNA, 19 nt, Homo sapiens
ugcgccucuacuucaccca

SEQ ID NO: 1975 - RNA, 19 nt, Homo sapiens
cgccucuacuucacccacu

SEQ ID NO: 1976 - RNA, 19 nt, Homo sapiens
gccucuacuucacccacuu

SEQ ID NO: 1977 - RNA, 19 nt, Homo sapiens
ccucuacuucacccacuuc

SEQ ID NO: 1978 - RNA, 19 nt, Homo sapiens
cucuacuucacccacuucg

SEQ ID NO: 1979 - RNA, 19 nt, Homo sapiens
ucuacuucacccacuucga

SEQ ID NO: 1980 - RNA, 19 nt, Homo sapiens
cuacuucacccacuucgac

SEQ ID NO: 1981 - RNA, 19 nt, Homo sapiens
acuucacccacuucgaccu

SEQ ID NO: 1982 - RNA, 19 nt, Homo sapiens
cuucacccacuucgaccug

SEQ ID NO: 1983 - RNA, 19 nt, Homo sapiens
ucacccacuucgaccugga

SEQ ID NO: 1984 - RNA, 19 nt, Homo sapiens
cccacuucgaccuggagcu

SEQ ID NO: 1985 - RNA, 19 nt, Homo sapiens
cacuucgaccuggagcucu

SEQ ID NO: 1986 - RNA, 19 nt, Homo sapiens
cgaccuggagcucucccac

SEQ ID NO: 1987 - RNA, 19 nt, Homo sapiens
ccuggagcucucccaccuc

SEQ ID NO: 1988 - RNA, 19 nt, Homo sapiens
ggagcucucccaccucugc

SEQ ID NO: 1989 - RNA, 19 nt, Homo sapiens
gagcucucccaccucugcg

SEQ ID NO: 1990 - RNA, 19 nt, Homo sapiens
agcucucccaccucugcga

SEQ ID NO: 1991 - RNA, 19 nt, Homo sapiens
ucucccaccucugcgagua

SEQ ID NO: 1992 - RNA, 19 nt, Homo sapiens
cucccaccucugcgaguac

SEQ ID NO: 1993 - RNA, 19 nt, Homo sapiens
cccaccucugcgaguacga

SEQ ID NO: 1994 - RNA, 19 nt, Homo sapiens
ccaccucugcgaguacgac

SEQ ID NO: 1995 - RNA, 19 nt, Homo sapiens
accucugcgaguacgacuu

SEQ ID NO: 1996 - RNA, 19 nt, Homo sapiens
ccucugcgaguacgacuuc

SEQ ID NO: 1997 - RNA, 19 nt, Homo sapiens
ucugcgaguacgacuucgu

SEQ ID NO: 1998 - RNA, 19 nt, Homo sapiens
cugcgaguacgacuucguc

SEQ ID NO: 1999 - RNA, 19 nt, Homo sapiens
gcgaguacgacuucgucaa

SEQ ID NO: 2000 - RNA, 19 nt, Homo sapiens
cgaguacgacuucgucaag

SEQ ID NO: 2001 - RNA, 19 nt, Homo sapiens
gaguacgacuucgucaagc

SEQ ID NO: 2002 - RNA, 19 nt, Homo sapiens
aguacgacuucgucaagcu

SEQ ID NO: 2003 - RNA, 19 nt, Homo sapiens
guacgacuucgucaagcug

SEQ ID NO: 2004 - RNA, 19 nt, Homo sapiens
acgacuucgucaagcugag

SEQ ID NO: 2005 - RNA, 19 nt, Homo sapiens
cgacuucgucaagcugagc

SEQ ID NO: 2006 - RNA, 19 nt, Homo sapiens
gacuucgucaagcugagcu

SEQ ID NO: 2007 - RNA, 19 nt, Homo sapiens
cgucaagcugagcucgggg

SEQ ID NO: 2008 - RNA, 19 nt, Homo sapiens
ccaaggugcuggccacgcu

SEQ ID NO: 2009 - RNA, 19 nt, Homo sapiens
uggccacgcugugcgggca

SEQ ID NO: 2010 - RNA, 19 nt, Homo sapiens
ccacgcugugcgggcagga

SEQ ID NO: 2011 - RNA, 19 nt, Homo sapiens
gugcgggcaggagagcaca

SEQ ID NO: 2012 - RNA, 19 nt, Homo sapiens
ggcaggagagcacagacac

SEQ ID NO: 2013 - RNA, 19 nt, Homo sapiens
gcaggagagcacagacacg

SEQ ID NO: 2014 - RNA, 19 nt, Homo sapiens
aggagagcacagacacgga

SEQ ID NO: 2015 - RNA, 19 nt, Homo sapiens
ggagagcacagacacggag

SEQ ID NO: 2016 - RNA, 19 nt, Homo sapiens
gagagcacagacacggagc

SEQ ID NO: 2017 - RNA, 19 nt, Homo sapiens
agagcacagacacggagcg

SEQ ID NO: 2018 - RNA, 19 nt, Homo sapiens
cgggccccuggcaaggaca

SEQ ID NO: 2019 - RNA, 19 nt, Homo sapiens
gccccuggcaaggacacuu

SEQ ID NO: 2020 - RNA, 19 nt, Homo sapiens
cuggcaaggacacuuucua

SEQ ID NO: 2021 - RNA, 19 nt, Homo sapiens
ggcaaggacacuuucuacu

SEQ ID NO: 2022 - RNA, 19 nt, Homo sapiens
gcaaggacacuuucuacuc

SEQ ID NO: 2023 - RNA, 19 nt, Homo sapiens
aggacacuuucuacucgcu

SEQ ID NO: 2024 - RNA, 19 nt, Homo sapiens
ggacacuuucuacucgcug

SEQ ID NO: 2025 - RNA, 19 nt, Homo sapiens
gacacuuucuacucgcugg

SEQ ID NO: 2026 - RNA, 19 nt, Homo sapiens
acacuuucuacucgcuggg

SEQ ID NO: 2027 - RNA, 19 nt, Homo sapiens
acuuucuacucgcugggcu

SEQ ID NO: 2028 - RNA, 19 nt, Homo sapiens
cuuucuacucgcugggcuc

SEQ ID NO: 2029 - RNA, 19 nt, Homo sapiens
cucgcugggcuccagccug

SEQ ID NO: 2030 - RNA, 19 nt, Homo sapiens
cgcugggcuccagccugga

SEQ ID NO: 2031 - RNA, 19 nt, Homo sapiens
cugggcuccagccuggaca

SEQ ID NO: 2032 - RNA, 19 nt, Homo sapiens
ugggcuccagccuggacau

SEQ ID NO: 2033 - RNA, 19 nt, Homo sapiens
gggcuccagccuggacauu

SEQ ID NO: 2034 - RNA, 19 nt, Homo sapiens
ggcuccagccuggacauua

SEQ ID NO: 2035 - RNA, 19 nt, Homo sapiens
gcuccagccuggacauuac

SEQ ID NO: 2036 - RNA, 19 nt, Homo sapiens
cuccagccuggacauuacc

SEQ ID NO: 2037 - RNA, 19 nt, Homo sapiens
ccagccuggacauuaccuu

SEQ ID NO: 2038 - RNA, 19 nt, Homo sapiens
cagccuggacauuaccuuc

SEQ ID NO: 2039 - RNA, 19 nt, Homo sapiens
gccuggacauuaccuuccg

SEQ ID NO: 2040 - RNA, 19 nt, Homo sapiens
ccuggacauuaccuuccgc

SEQ ID NO: 2041 - RNA, 19 nt, Homo sapiens
cuggacauuaccuuccgcu

SEQ ID NO: 2042 - RNA, 19 nt, Homo sapiens
ggacauuaccuuccgcucc

SEQ ID NO: 2043 - RNA, 19 nt, Homo sapiens
gacauuaccuuccgcuccg

SEQ ID NO: 2044 - RNA, 19 nt, Homo sapiens
acauuaccuuccgcuccga

SEQ ID NO: 2045 - RNA, 19 nt, Homo sapiens
cauuaccuuccgcuccgac

SEQ ID NO: 2046 - RNA, 19 nt, Homo sapiens
uuaccuuccgcuccgacua

SEQ ID NO: 2047 - RNA, 19 nt, Homo sapiens
accuuccgcuccgacuacu

SEQ ID NO: 2048 - RNA, 19 nt, Homo sapiens
ccuuccgcuccgacuacuc

SEQ ID NO: 2049 - RNA, 19 nt, Homo sapiens
cuuccgcuccgacuacucc

SEQ ID NO: 2050 - RNA, 19 nt, Homo sapiens
uccgacuacuccaacgaga

SEQ ID NO: 2051 - RNA, 19 nt, Homo sapiens
ccgacuacuccaacgagaa

SEQ ID NO: 2052 - RNA, 19 nt, Homo sapiens
cgacuacuccaacgagaag

SEQ ID NO: 2053 - RNA, 19 nt, Homo sapiens
acuccaacgagaagccguu

SEQ ID NO: 2054 - RNA, 19 nt, Homo sapiens
cuccaacgagaagccguuc

SEQ ID NO: 2055 - RNA, 19 nt, Homo sapiens
acgagaagccguucacggg

SEQ ID NO: 2056 - RNA, 19 nt, Homo sapiens
cgagaagccguucacgggg

SEQ ID NO: 2057 - RNA, 19 nt, Homo sapiens
gagaagccguucacggggu

SEQ ID NO: 2058 - RNA, 19 nt, Homo sapiens
gaagccguucacgggguuc

SEQ ID NO: 2059 - RNA, 19 nt, Homo sapiens
agccguucacgggguucga

SEQ ID NO: 2060 - RNA, 19 nt, Homo sapiens
ccguucacgggguucgagg

SEQ ID NO: 2061 - RNA, 19 nt, Homo sapiens
cguucacgggguucgaggc

SEQ ID NO: 2062 - RNA, 19 nt, Homo sapiens
ucacgggguucgaggccuu

SEQ ID NO: 2063 - RNA, 19 nt, Homo sapiens
gggguucgaggccuucuau

SEQ ID NO: 2064 - RNA, 19 nt, Homo sapiens
ggguucgaggccuucuaug

SEQ ID NO: 2065 - RNA, 19 nt, Homo sapiens
gguucgaggccuucuaugc

SEQ ID NO: 2066 - RNA, 19 nt, Homo sapiens
guucgaggccuucuaugca

SEQ ID NO: 2067 - RNA, 19 nt, Homo sapiens
ggccuucuaugcagccgag

SEQ ID NO: 2068 - RNA, 19 nt, Homo sapiens
ucuaugcagccgaggacau

SEQ ID NO: 2069 - RNA, 19 nt, Homo sapiens
cuaugcagccgaggacauu

SEQ ID NO: 2070 - RNA, 19 nt, Homo sapiens
uaugcagccgaggacauug

SEQ ID NO: 2071 - RNA, 19 nt, Homo sapiens
augcagccgaggacauuga

SEQ ID NO: 2072 - RNA, 19 nt, Homo sapiens
gcagccgaggacauugacg

SEQ ID NO: 2073 - RNA, 19 nt, Homo sapiens
cagccgaggacauugacga

SEQ ID NO: 2074 - RNA, 19 nt, Homo sapiens
agccgaggacauugacgag

SEQ ID NO: 2075 - RNA, 19 nt, Homo sapiens
gccgaggacauugacgagu

SEQ ID NO: 2076 - RNA, 19 nt, Homo sapiens
ccgaggacauugacgagug

SEQ ID NO: 2077 - RNA, 19 nt, Homo sapiens
cgaggacauugacgagugc

SEQ ID NO: 2078 - RNA, 19 nt, Homo sapiens
agugccagguggccccggg

SEQ ID NO: 2079 - RNA, 19 nt, Homo sapiens
ggagaggcgcccaccugcg

SEQ ID NO: 2080 - RNA, 19 nt, Homo sapiens
gagaggcgcccaccugcga

SEQ ID NO: 2081 - RNA, 19 nt, Homo sapiens
cccaccugcgaccaccacu

SEQ ID NO: 2082 - RNA, 19 nt, Homo sapiens
gcgaccaccacugccacaa

SEQ ID NO: 2083 - RNA, 19 nt, Homo sapiens
cgaccaccacugccacaac

SEQ ID NO: 2084 - RNA, 19 nt, Homo sapiens
accaccacugccacaacca

SEQ ID NO: 2085 - RNA, 19 nt, Homo sapiens
ccaccacugccacaaccac

SEQ ID NO: 2086 - RNA, 19 nt, Homo sapiens
accacugccacaaccaccu

SEQ ID NO: 2087 - RNA, 19 nt, Homo sapiens
ccacugccacaaccaccug

SEQ ID NO: 2088 - RNA, 19 nt, Homo sapiens
acugccacaaccaccuggg

SEQ ID NO: 2089 - RNA, 19 nt, Homo sapiens
gccacaaccaccugggcgg

SEQ ID NO: 2090 - RNA, 19 nt, Homo sapiens
cacaaccaccugggcgguu

SEQ ID NO: 2091 - RNA, 19 nt, Homo sapiens
acaaccaccugggcgguuu

SEQ ID NO: 2092 - RNA, 19 nt, Homo sapiens
caaccaccugggcgguuuc

SEQ ID NO: 2093 - RNA, 19 nt, Homo sapiens
ccaccugggcgguuucuac

SEQ ID NO: 2094 - RNA, 19 nt, Homo sapiens
gggcgguuucuacugcucc

SEQ ID NO: 2095 - RNA, 19 nt, Homo sapiens
ggcgguuucuacugcuccu

SEQ ID NO: 2096 - RNA, 19 nt, Homo sapiens
gcgguuucuacugcuccug

SEQ ID NO: 2097 - RNA, 19 nt, Homo sapiens
cgguuucuacugcuccugc

SEQ ID NO: 2098 - RNA, 19 nt, Homo sapiens
guuucuacugcuccugccg

SEQ ID NO: 2099 - RNA, 19 nt, Homo sapiens
gcuccugccgcgcaggcua

SEQ ID NO: 2100 - RNA, 19 nt, Homo sapiens
cugccgcgcaggcuacguc

SEQ ID NO: 2101 - RNA, 19 nt, Homo sapiens
ggcuacguccugcaccgua

SEQ ID NO: 2102 - RNA, 19 nt, Homo sapiens
gcuacguccugcaccguaa

SEQ ID NO: 2103 - RNA, 19 nt, Homo sapiens
cuacguccugcaccguaac

SEQ ID NO: 2104 - RNA, 19 nt, Homo sapiens
acguccugcaccguaacaa

SEQ ID NO: 2105 - RNA, 19 nt, Homo sapiens
cguccugcaccguaacaag

SEQ ID NO: 2106 - RNA, 19 nt, Homo sapiens
cugcaccguaacaagcgca

SEQ ID NO: 2107 - RNA, 19 nt, Homo sapiens
gcaccguaacaagcgcacc

SEQ ID NO: 2108 - RNA, 19 nt, Homo sapiens
caccguaacaagcgcaccu

SEQ ID NO: 2109 - RNA, 19 nt, Homo sapiens
ccguaacaagcgcaccugc

SEQ ID NO: 2110 - RNA, 19 nt, Homo sapiens
cguaacaagcgcaccugcu

SEQ ID NO: 2111 - RNA, 19 nt, Homo sapiens
caagcgcaccugcucagcc

SEQ ID NO: 2112 - RNA, 19 nt, Homo sapiens
gccaggucuucacccagag

SEQ ID NO: 2113 - RNA, 19 nt, Homo sapiens
aggucuucacccagagguc

SEQ ID NO: 2114 - RNA, 19 nt, Homo sapiens
acccagaggucuggggagc

SEQ ID NO: 2115 - RNA, 19 nt, Homo sapiens
cccagaggucuggggagcu

SEQ ID NO: 2116 - RNA, 19 nt, Homo sapiens
ccagaggucuggggagcuc

SEQ ID NO: 2117 - RNA, 19 nt, Homo sapiens
cagaggucuggggagcuca

SEQ ID NO: 2118 - RNA, 19 nt, Homo sapiens
agaggucuggggagcucag

SEQ ID NO: 2119 - RNA, 19 nt, Homo sapiens
ggucuggggagcucagcag

SEQ ID NO: 2120 - RNA, 19 nt, Homo sapiens
uggggagcucagcagcccu

SEQ ID NO: 2121 - RNA, 19 nt, Homo sapiens
ggggagcucagcagcccug

SEQ ID NO: 2122 - RNA, 19 nt, Homo sapiens
ggagcucagcagcccugaa

SEQ ID NO: 2123 - RNA, 19 nt, Homo sapiens
gagcucagcagcccugaau

SEQ ID NO: 2124 - RNA, 19 nt, Homo sapiens
gcucagcagcccugaauac

SEQ ID NO: 2125 - RNA, 19 nt, Homo sapiens
cagcagcccugaauaccca

SEQ ID NO: 2126 - RNA, 19 nt, Homo sapiens
agcagcccugaauacccac

SEQ ID NO: 2127 - RNA, 19 nt, Homo sapiens
gcagcccugaauacccacg

SEQ ID NO: 2128 - RNA, 19 nt, Homo sapiens
cugaauacccacggccgua

SEQ ID NO: 2129 - RNA, 19 nt, Homo sapiens
cccacggccguaucccaaa

SEQ ID NO: 2130 - RNA, 19 nt, Homo sapiens
ccacggccguaucccaaac

SEQ ID NO: 2131 - RNA, 19 nt, Homo sapiens
ggccguaucccaaacucuc

SEQ ID NO: 2132 - RNA, 19 nt, Homo sapiens
gccguaucccaaacucucc

SEQ ID NO: 2133 - RNA, 19 nt, Homo sapiens
cguaucccaaacucuccag

SEQ ID NO: 2134 - RNA, 19 nt, Homo sapiens
guaucccaaacucuccagu

SEQ ID NO: 2135 - RNA, 19 nt, Homo sapiens
uaucccaaacucuccaguu

SEQ ID NO: 2136 - RNA, 19 nt, Homo sapiens
cccaaacucuccaguugca

SEQ ID NO: 2137 - RNA, 19 nt, Homo sapiens
caaacucuccaguugcacu

SEQ ID NO: 2138 - RNA, 19 nt, Homo sapiens
aaacucuccaguugcacuu

SEQ ID NO: 2139 - RNA, 19 nt, Homo sapiens
aacucuccaguugcacuua

SEQ ID NO: 2140 - RNA, 19 nt, Homo sapiens
acucuccaguugcacuuac

SEQ ID NO: 2141 - RNA, 19 nt, Homo sapiens
cucuccaguugcacuuaca

SEQ ID NO: 2142 - RNA, 19 nt, Homo sapiens
uccaguugcacuuacagca

SEQ ID NO: 2143 - RNA, 19 nt, Homo sapiens
ccaguugcacuuacagcau

SEQ ID NO: 2144 - RNA, 19 nt, Homo sapiens
caguugcacuuacagcauc

SEQ ID NO: 2145 - RNA, 19 nt, Homo sapiens
aguugcacuuacagcauca

SEQ ID NO: 2146 - RNA, 19 nt, Homo sapiens
guugcacuuacagcaucag

SEQ ID NO: 2147 - RNA, 19 nt, Homo sapiens
cacuuacagcaucagccug

SEQ ID NO: 2148 - RNA, 19 nt, Homo sapiens
cuuacagcaucagccugga

SEQ ID NO: 2149 - RNA, 19 nt, Homo sapiens
gcaucagccuggaggaggg

SEQ ID NO: 2150 - RNA, 19 nt, Homo sapiens
ucagccuggaggagggguu

SEQ ID NO: 2151 - RNA, 19 nt, Homo sapiens
ccuggaggagggguucagu

SEQ ID NO: 2152 - RNA, 19 nt, Homo sapiens
cuggaggagggguucagug

SEQ ID NO: 2153 - RNA, 19 nt, Homo sapiens
uggaggagggguucagugu

SEQ ID NO: 2154 - RNA, 19 nt, Homo sapiens
ggaggagggguucaguguc

SEQ ID NO: 2155 - RNA, 19 nt, Homo sapiens
gaggagggguucaguguca

SEQ ID NO: 2156 - RNA, 19 nt, Homo sapiens
aggagggguucagugucau

SEQ ID NO: 2157 - RNA, 19 nt, Homo sapiens
ggagggguucagugucauu

SEQ ID NO: 2158 - RNA, 19 nt, Homo sapiens
gagggguucagugucauuc

SEQ ID NO: 2159 - RNA, 19 nt, Homo sapiens
gggguucagugucauucug

SEQ ID NO: 2160 - RNA, 19 nt, Homo sapiens
gguucagugucauucugga

SEQ ID NO: 2161 - RNA, 19 nt, Homo sapiens
guucagugucauucuggac

SEQ ID NO: 2162 - RNA, 19 nt, Homo sapiens
ucagugucauucuggacuu

SEQ ID NO: 2163 - RNA, 19 nt, Homo sapiens
cagugucauucuggacuuu

SEQ ID NO: 2164 - RNA, 19 nt, Homo sapiens
agugucauucuggacuuug

SEQ ID NO: 2165 - RNA, 19 nt, Homo sapiens
gugucauucuggacuuugu

SEQ ID NO: 2166 - RNA, 19 nt, Homo sapiens
gacuuuguggaguccuucg

SEQ ID NO: 2167 - RNA, 19 nt, Homo sapiens
acuuuguggaguccuucga

SEQ ID NO: 2168 - RNA, 19 nt, Homo sapiens
uuguggaguccuucgaugu

SEQ ID NO: 2169 - RNA, 19 nt, Homo sapiens
uguggaguccuucgaugug

SEQ ID NO: 2170 - RNA, 19 nt, Homo sapiens
uggaguccuucgaugugga

SEQ ID NO: 2171 - RNA, 19 nt, Homo sapiens
gaguccuucgauguggaga

SEQ ID NO: 2172 - RNA, 19 nt, Homo sapiens
aguccuucgauguggagac

SEQ ID NO: 2173 - RNA, 19 nt, Homo sapiens
guccuucgauguggagaca

SEQ ID NO: 2174 - RNA, 19 nt, Homo sapiens
ccuucgauguggagacaca

SEQ ID NO: 2175 - RNA, 19 nt, Homo sapiens
cuucgauguggagacacac

SEQ ID NO: 2176 - RNA, 19 nt, Homo sapiens
auguggagacacacccuga

SEQ ID NO: 2177 - RNA, 19 nt, Homo sapiens
uguggagacacacccugaa

SEQ ID NO: 2178 - RNA, 19 nt, Homo sapiens
guggagacacacccugaaa

SEQ ID NO: 2179 - RNA, 19 nt, Homo sapiens
ggagacacacccugaaacc

SEQ ID NO: 2180 - RNA, 19 nt, Homo sapiens
agacacacccugaaacccu

SEQ ID NO: 2181 - RNA, 19 nt, Homo sapiens
acacacccugaaacccugu

SEQ ID NO: 2182 - RNA, 19 nt, Homo sapiens
cacacccugaaacccugug

SEQ ID NO: 2183 - RNA, 19 nt, Homo sapiens
cacccugaaacccuguguc

SEQ ID NO: 2184 - RNA, 19 nt, Homo sapiens
acccugaaacccugugucc

SEQ ID NO: 2185 - RNA, 19 nt, Homo sapiens
cccugaaacccuguguccc

SEQ ID NO: 2186 - RNA, 19 nt, Homo sapiens
ccugaaacccugugucccu

SEQ ID NO: 2187 - RNA, 19 nt, Homo sapiens
cugaaacccugugucccua

SEQ ID NO: 2188 - RNA, 19 nt, Homo sapiens
gaaacccugugucccuacg

SEQ ID NO: 2189 - RNA, 19 nt, Homo sapiens
acccugugucccuacgacu

SEQ ID NO: 2190 - RNA, 19 nt, Homo sapiens
cccugugucccuacgacuu

SEQ ID NO: 2191 - RNA, 19 nt, Homo sapiens
ccugugucccuacgacuuu

SEQ ID NO: 2192 - RNA, 19 nt, Homo sapiens
cugugucccuacgacuuuc

SEQ ID NO: 2193 - RNA, 19 nt, Homo sapiens
ugugucccuacgacuuucu

SEQ ID NO: 2194 - RNA, 19 nt, Homo sapiens
gugucccuacgacuuucuc

SEQ ID NO: 2195 - RNA, 19 nt, Homo sapiens
ugucccuacgacuuucuca

SEQ ID NO: 2196 - RNA, 19 nt, Homo sapiens
gucccuacgacuuucucaa

SEQ ID NO: 2197 - RNA, 19 nt, Homo sapiens
cccuacgacuuucucaaga

SEQ ID NO: 2198 - RNA, 19 nt, Homo sapiens
cuacgacuuucucaagauu

SEQ ID NO: 2199 - RNA, 19 nt, Homo sapiens
acgacuuucucaagauuca

SEQ ID NO: 2200 - RNA, 19 nt, Homo sapiens
gacuuucucaagauucaaa

SEQ ID NO: 2201 - RNA, 19 nt, Homo sapiens
acuuucucaagauucaaac

SEQ ID NO: 2202 - RNA, 19 nt, Homo sapiens
cuuucucaagauucaaaca

SEQ ID NO: 2203 - RNA, 19 nt, Homo sapiens
uucucaagauucaaacaga

SEQ ID NO: 2204 - RNA, 19 nt, Homo sapiens
ucucaagauucaaacagac

SEQ ID NO: 2205 - RNA, 19 nt, Homo sapiens
cucaagauucaaacagaca

SEQ ID NO: 2206 - RNA, 19 nt, Homo sapiens
ucaagauucaaacagacag

SEQ ID NO: 2207 - RNA, 19 nt, Homo sapiens
caagauucaaacagacaga

SEQ ID NO: 2208 - RNA, 19 nt, Homo sapiens
aagauucaaacagacagag

SEQ ID NO: 2209 - RNA, 19 nt, Homo sapiens
agauucaaacagacagaga

SEQ ID NO: 2210 - RNA, 19 nt, Homo sapiens
gauucaaacagacagagaa

SEQ ID NO: 2211 - RNA, 19 nt, Homo sapiens
caaacagacagagaagaac

SEQ ID NO: 2212 - RNA, 19 nt, Homo sapiens
aaacagacagagaagaaca

SEQ ID NO: 2213 - RNA, 19 nt, Homo sapiens
aacagacagagaagaacau

SEQ ID NO: 2214 - RNA, 19 nt, Homo sapiens
gacagagaagaacauggcc

SEQ ID NO: 2215 - RNA, 19 nt, Homo sapiens
cagagaagaacauggccca

SEQ ID NO: 2216 - RNA, 19 nt, Homo sapiens
agaagaacauggcccauuc

SEQ ID NO: 2217 - RNA, 19 nt, Homo sapiens
ggcccauucugugggaaga

SEQ ID NO: 2218 - RNA, 19 nt, Homo sapiens
gcccauucugugggaagac

SEQ ID NO: 2219 - RNA, 19 nt, Homo sapiens
cccauucugugggaagaca

SEQ ID NO: 2220 - RNA, 19 nt, Homo sapiens
ccauucugugggaagacau

SEQ ID NO: 2221 - RNA, 19 nt, Homo sapiens
cauucugugggaagacauu

SEQ ID NO: 2222 - RNA, 19 nt, Homo sapiens
gacauugccccacaggauu

SEQ ID NO: 2223 - RNA, 19 nt, Homo sapiens
gccccacaggauugaaaca

SEQ ID NO: 2224 - RNA, 19 nt, Homo sapiens
cccacaggauugaaacaaa

SEQ ID NO: 2225 - RNA, 19 nt, Homo sapiens
ccacaggauugaaacaaaa

SEQ ID NO: 2226 - RNA, 19 nt, Homo sapiens
cacaggauugaaacaaaaa

SEQ ID NO: 2227 - RNA, 19 nt, Homo sapiens
acaggauugaaacaaaaag

SEQ ID NO: 2228 - RNA, 19 nt, Homo sapiens
ggauugaaacaaaaagcaa

SEQ ID NO: 2229 - RNA, 19 nt, Homo sapiens
gauugaaacaaaaagcaac

SEQ ID NO: 2230 - RNA, 19 nt, Homo sapiens
auugaaacaaaaagcaaca

SEQ ID NO: 2231 - RNA, 19 nt, Homo sapiens
gaaacaaaaagcaacacgg

SEQ ID NO: 2232 - RNA, 19 nt, Homo sapiens
aaacaaaaagcaacacggu

SEQ ID NO: 2233 - RNA, 19 nt, Homo sapiens
acaaaaagcaacacgguga

SEQ ID NO: 2234 - RNA, 19 nt, Homo sapiens
caaaaagcaacacggugac

SEQ ID NO: 2235 - RNA, 19 nt, Homo sapiens
aaaagcaacacggugacca

SEQ ID NO: 2236 - RNA, 19 nt, Homo sapiens
aaagcaacacggugaccau

SEQ ID NO: 2237 - RNA, 19 nt, Homo sapiens
aagcaacacggugaccauc

SEQ ID NO: 2238 - RNA, 19 nt, Homo sapiens
acacggugaccaucaccuu

SEQ ID NO: 2239 - RNA, 19 nt, Homo sapiens
cacggugaccaucaccuuu

SEQ ID NO: 2240 - RNA, 19 nt, Homo sapiens
acggugaccaucaccuuug

SEQ ID NO: 2241 - RNA, 19 nt, Homo sapiens
cggugaccaucaccuuugu

SEQ ID NO: 2242 - RNA, 19 nt, Homo sapiens
ggugaccaucaccuuuguc

SEQ ID NO: 2243 - RNA, 19 nt, Homo sapiens
gugaccaucaccuuuguca

SEQ ID NO: 2244 - RNA, 19 nt, Homo sapiens
gaccaucaccuuugucaca

SEQ ID NO: 2245 - RNA, 19 nt, Homo sapiens
accaucaccuuugucacag

SEQ ID NO: 2246 - RNA, 19 nt, Homo sapiens
ccaucaccuuugucacaga

SEQ ID NO: 2247 - RNA, 19 nt, Homo sapiens
caucaccuuugucacagau

SEQ ID NO: 2248 - RNA, 19 nt, Homo sapiens
ucaccuuugucacagauga

SEQ ID NO: 2249 - RNA, 19 nt, Homo sapiens
accuuugucacagaugaau

SEQ ID NO: 2250 - RNA, 19 nt, Homo sapiens
ccuuugucacagaugaauc

SEQ ID NO: 2251 - RNA, 19 nt, Homo sapiens
cuuugucacagaugaauca

SEQ ID NO: 2252 - RNA, 19 nt, Homo sapiens
ugucacagaugaaucagga

SEQ ID NO: 2253 - RNA, 19 nt, Homo sapiens
ucacagaugaaucaggaga

SEQ ID NO: 2254 - RNA, 19 nt, Homo sapiens
acagaugaaucaggagacc

SEQ ID NO: 2255 - RNA, 19 nt, Homo sapiens
cagaugaaucaggagacca

SEQ ID NO: 2256 - RNA, 19 nt, Homo sapiens
agaugaaucaggagaccac

SEQ ID NO: 2257 - RNA, 19 nt, Homo sapiens
caggagaccacacaggcug

SEQ ID NO: 2258 - RNA, 19 nt, Homo sapiens
gagaccacacaggcuggaa

SEQ ID NO: 2259 - RNA, 19 nt, Homo sapiens
agaccacacaggcuggaag

SEQ ID NO: 2260 - RNA, 19 nt, Homo sapiens
gaccacacaggcuggaaga

SEQ ID NO: 2261 - RNA, 19 nt, Homo sapiens
accacacaggcuggaagau

SEQ ID NO: 2262 - RNA, 19 nt, Homo sapiens
cacacaggcuggaagaucc

SEQ ID NO: 2263 - RNA, 19 nt, Homo sapiens
acaggcuggaagauccacu

SEQ ID NO: 2264 - RNA, 19 nt, Homo sapiens
caggcuggaagauccacua

SEQ ID NO: 2265 - RNA, 19 nt, Homo sapiens
aggcuggaagauccacuac

SEQ ID NO: 2266 - RNA, 19 nt, Homo sapiens
ggcuggaagauccacuaca

SEQ ID NO: 2267 - RNA, 19 nt, Homo sapiens
gcuggaagauccacuacac

SEQ ID NO: 2268 - RNA, 19 nt, Homo sapiens
cuggaagauccacuacacg

SEQ ID NO: 2269 - RNA, 19 nt, Homo sapiens
uggaagauccacuacacga

SEQ ID NO: 2270 - RNA, 19 nt, Homo sapiens
ggaagauccacuacacgag

SEQ ID NO: 2271 - RNA, 19 nt, Homo sapiens
agauccacuacacgagcac

SEQ ID NO: 2272 - RNA, 19 nt, Homo sapiens
gauccacuacacgagcaca

SEQ ID NO: 2273 - RNA, 19 nt, Homo sapiens
ccacuacacgagcacagcg

SEQ ID NO: 2274 - RNA, 19 nt, Homo sapiens
acuacacgagcacagcgca

SEQ ID NO: 2275 - RNA, 19 nt, Homo sapiens
cuacacgagcacagcgcag

SEQ ID NO: 2276 - RNA, 19 nt, Homo sapiens
acagcgcagccuugcccuu

SEQ ID NO: 2277 - RNA, 19 nt, Homo sapiens
cagcgcagccuugcccuua

SEQ ID NO: 2278 - RNA, 19 nt, Homo sapiens
agcgcagccuugcccuuau

SEQ ID NO: 2279 - RNA, 19 nt, Homo sapiens
gcgcagccuugcccuuauc

SEQ ID NO: 2280 - RNA, 19 nt, Homo sapiens
cagccuugcccuuauccga

SEQ ID NO: 2281 - RNA, 19 nt, Homo sapiens
agccuugcccuuauccgau

SEQ ID NO: 2282 - RNA, 19 nt, Homo sapiens
gccuugcccuuauccgaug

SEQ ID NO: 2283 - RNA, 19 nt, Homo sapiens
gcccuuauccgauggcgcc

SEQ ID NO: 2284 - RNA, 19 nt, Homo sapiens
auccgauggcgccaccuaa

SEQ ID NO: 2285 - RNA, 19 nt, Homo sapiens
uccgauggcgccaccuaau

SEQ ID NO: 2286 - RNA, 19 nt, Homo sapiens
cgauggcgccaccuaaugg

SEQ ID NO: 2287 - RNA, 19 nt, Homo sapiens
uggcgccaccuaauggcca

SEQ ID NO: 2288 - RNA, 19 nt, Homo sapiens
ggcgccaccuaauggccac

SEQ ID NO: 2289 - RNA, 19 nt, Homo sapiens
ccaccuaauggccacguuu

SEQ ID NO: 2290 - RNA, 19 nt, Homo sapiens
caccuaauggccacguuuc

SEQ ID NO: 2291 - RNA, 19 nt, Homo sapiens
accuaauggccacguuuca

SEQ ID NO: 2292 - RNA, 19 nt, Homo sapiens
uaauggccacguuucaccu

SEQ ID NO: 2293 - RNA, 19 nt, Homo sapiens
auggccacguuucaccugu

SEQ ID NO: 2294 - RNA, 19 nt, Homo sapiens
uggccacguuucaccugug

SEQ ID NO: 2295 - RNA, 19 nt, Homo sapiens
ggccacguuucaccugugc

SEQ ID NO: 2296 - RNA, 19 nt, Homo sapiens
cacguuucaccugugcaag

SEQ ID NO: 2297 - RNA, 19 nt, Homo sapiens
acguuucaccugugcaagc

SEQ ID NO: 2298 - RNA, 19 nt, Homo sapiens
cguuucaccugugcaagcc

SEQ ID NO: 2299 - RNA, 19 nt, Homo sapiens
uuucaccugugcaagccaa

SEQ ID NO: 2300 - RNA, 19 nt, Homo sapiens
uucaccugugcaagccaaa

SEQ ID NO: 2301 - RNA, 19 nt, Homo sapiens
caccugugcaagccaaaua

SEQ ID NO: 2302 - RNA, 19 nt, Homo sapiens
accugugcaagccaaauac

SEQ ID NO: 2303 - RNA, 19 nt, Homo sapiens
ccugugcaagccaaauaca

SEQ ID NO: 2304 - RNA, 19 nt, Homo sapiens
cugugcaagccaaauacau

SEQ ID NO: 2305 - RNA, 19 nt, Homo sapiens
ugugcaagccaaauacauc

SEQ ID NO: 2306 - RNA, 19 nt, Homo sapiens
gugcaagccaaauacaucc

SEQ ID NO: 2307 - RNA, 19 nt, Homo sapiens
caagccaaauacauccuga

SEQ ID NO: 2308 - RNA, 19 nt, Homo sapiens
aagccaaauacauccugaa

SEQ ID NO: 2309 - RNA, 19 nt, Homo sapiens
agccaaauacauccugaaa

SEQ ID NO: 2310 - RNA, 19 nt, Homo sapiens
gccaaauacauccugaaag

SEQ ID NO: 2311 - RNA, 19 nt, Homo sapiens
ccaaauacauccugaaaga

SEQ ID NO: 2312 - RNA, 19 nt, Homo sapiens
caaauacauccugaaagac

SEQ ID NO: 2313 - RNA, 19 nt, Homo sapiens
aaauacauccugaaagaca

SEQ ID NO: 2314 - RNA, 19 nt, Homo sapiens
cauccugaaagacagcuuc

SEQ ID NO: 2315 - RNA, 19 nt, Homo sapiens
uccugaaagacagcuucuc

SEQ ID NO: 2316 - RNA, 19 nt, Homo sapiens
cugaaagacagcuucucca

SEQ ID NO: 2317 - RNA, 19 nt, Homo sapiens
ugaaagacagcuucuccau

SEQ ID NO: 2318 - RNA, 19 nt, Homo sapiens
gaaagacagcuucuccauc

SEQ ID NO: 2319 - RNA, 19 nt, Homo sapiens
agacagcuucuccaucuuu

SEQ ID NO: 2320 - RNA, 19 nt, Homo sapiens
gacagcuucuccaucuuuu

SEQ ID NO: 2321 - RNA, 19 nt, Homo sapiens
gcuucuccaucuuuugcga

SEQ ID NO: 2322 - RNA, 19 nt, Homo sapiens
cuccaucuuuugcgagacu

SEQ ID NO: 2323 - RNA, 19 nt, Homo sapiens
ccaucuuuugcgagacugg

SEQ ID NO: 2324 - RNA, 19 nt, Homo sapiens
caucuuuugcgagacuggc

SEQ ID NO: 2325 - RNA, 19 nt, Homo sapiens
aucuuuugcgagacuggcu

SEQ ID NO: 2326 - RNA, 19 nt, Homo sapiens
gcgagacuggcuaugagcu

SEQ ID NO: 2327 - RNA, 19 nt, Homo sapiens
cgagacuggcuaugagcuu

SEQ ID NO: 2328 - RNA, 19 nt, Homo sapiens
agacuggcuaugagcuucu

SEQ ID NO: 2329 - RNA, 19 nt, Homo sapiens
cuggcuaugagcuucugca

SEQ ID NO: 2330 - RNA, 19 nt, Homo sapiens
ggcuaugagcuucugcaag

SEQ ID NO: 2331 - RNA, 19 nt, Homo sapiens
gcuaugagcuucugcaagg

SEQ ID NO: 2332 - RNA, 19 nt, Homo sapiens
gagcuucugcaaggucacu

SEQ ID NO: 2333 - RNA, 19 nt, Homo sapiens
agcuucugcaaggucacuu

SEQ ID NO: 2334 - RNA, 19 nt, Homo sapiens
gcaaggucacuugccccug

SEQ ID NO: 2335 - RNA, 19 nt, Homo sapiens
caaggucacuugccccuga

SEQ ID NO: 2336 - RNA, 19 nt, Homo sapiens
aaggucacuugccccugaa

SEQ ID NO: 2337 - RNA, 19 nt, Homo sapiens
aggucacuugccccugaaa

SEQ ID NO: 2338 - RNA, 19 nt, Homo sapiens
ggucacuugccccugaaau

SEQ ID NO: 2339 - RNA, 19 nt, Homo sapiens
gucacuugccccugaaauc

SEQ ID NO: 2340 - RNA, 19 nt, Homo sapiens
cuugccccugaaauccuuu

SEQ ID NO: 2341 - RNA, 19 nt, Homo sapiens
uugccccugaaauccuuua

SEQ ID NO: 2342 - RNA, 19 nt, Homo sapiens
ugccccugaaauccuuuac

SEQ ID NO: 2343 - RNA, 19 nt, Homo sapiens
gccccugaaauccuuuacu

SEQ ID NO: 2344 - RNA, 19 nt, Homo sapiens
ccccugaaauccuuuacug

SEQ ID NO: 2345 - RNA, 19 nt, Homo sapiens
cccugaaauccuuuacugc

SEQ ID NO: 2346 - RNA, 19 nt, Homo sapiens
ccugaaauccuuuacugca

SEQ ID NO: 2347 - RNA, 19 nt, Homo sapiens
gaaauccuuuacugcaguu

SEQ ID NO: 2348 - RNA, 19 nt, Homo sapiens
aaauccuuuacugcaguuu

SEQ ID NO: 2349 - RNA, 19 nt, Homo sapiens
auccuuuacugcaguuugu

SEQ ID NO: 2350 - RNA, 19 nt, Homo sapiens
uccuuuacugcaguuuguc

SEQ ID NO: 2351 - RNA, 19 nt, Homo sapiens
ccuuuacugcaguuuguca

SEQ ID NO: 2352 - RNA, 19 nt, Homo sapiens
cuuuacugcaguuugucag

SEQ ID NO: 2353 - RNA, 19 nt, Homo sapiens
uacugcaguuugucagaaa

SEQ ID NO: 2354 - RNA, 19 nt, Homo sapiens
acugcaguuugucagaaag

SEQ ID NO: 2355 - RNA, 19 nt, Homo sapiens
cugcaguuugucagaaaga

SEQ ID NO: 2356 - RNA, 19 nt, Homo sapiens
ugcaguuugucagaaagau

SEQ ID NO: 2357 - RNA, 19 nt, Homo sapiens
caguuugucagaaagaugg

SEQ ID NO: 2358 - RNA, 19 nt, Homo sapiens
guuugucagaaagauggau

SEQ ID NO: 2359 - RNA, 19 nt, Homo sapiens
uugucagaaagauggaucu

SEQ ID NO: 2360 - RNA, 19 nt, Homo sapiens
cagaaagauggaucuuggg

SEQ ID NO: 2361 - RNA, 19 nt, Homo sapiens
agaaagauggaucuuggga

SEQ ID NO: 2362 - RNA, 19 nt, Homo sapiens
gaaagauggaucuugggac

SEQ ID NO: 2363 - RNA, 19 nt, Homo sapiens
agauggaucuugggaccgg

SEQ ID NO: 2364 - RNA, 19 nt, Homo sapiens
gauggaucuugggaccggc

SEQ ID NO: 2365 - RNA, 19 nt, Homo sapiens
ccaaugcccgcgugcagca

SEQ ID NO: 2366 - RNA, 19 nt, Homo sapiens
caaugcccgcgugcagcau

SEQ ID NO: 2367 - RNA, 19 nt, Homo sapiens
aaugcccgcgugcagcauu

SEQ ID NO: 2368 - RNA, 19 nt, Homo sapiens
cccgcgugcagcauuguug

SEQ ID NO: 2369 - RNA, 19 nt, Homo sapiens
ccgcgugcagcauuguuga

SEQ ID NO: 2370 - RNA, 19 nt, Homo sapiens
cgugcagcauuguugacug

SEQ ID NO: 2371 - RNA, 19 nt, Homo sapiens
gugcagcauuguugacugu

SEQ ID NO: 2372 - RNA, 19 nt, Homo sapiens
gcagcauuguugacugugg

SEQ ID NO: 2373 - RNA, 19 nt, Homo sapiens
gcauuguugacuguggccc

SEQ ID NO: 2374 - RNA, 19 nt, Homo sapiens
cauuguugacuguggcccu

SEQ ID NO: 2375 - RNA, 19 nt, Homo sapiens
auuguugacuguggcccuc

SEQ ID NO: 2376 - RNA, 19 nt, Homo sapiens
ugacuguggcccuccugau

SEQ ID NO: 2377 - RNA, 19 nt, Homo sapiens
gacuguggcccuccugaug

SEQ ID NO: 2378 - RNA, 19 nt, Homo sapiens
acuguggcccuccugauga

SEQ ID NO: 2379 - RNA, 19 nt, Homo sapiens
cuguggcccuccugaugau

SEQ ID NO: 2380 - RNA, 19 nt, Homo sapiens
uggcccuccugaugaucua

SEQ ID NO: 2381 - RNA, 19 nt, Homo sapiens
gcccuccugaugaucuacc

SEQ ID NO: 2382 - RNA, 19 nt, Homo sapiens
ccuccugaugaucuaccca

SEQ ID NO: 2383 - RNA, 19 nt, Homo sapiens
uccugaugaucuacccagu

SEQ ID NO: 2384 - RNA, 19 nt, Homo sapiens
ccugaugaucuacccagug

SEQ ID NO: 2385 - RNA, 19 nt, Homo sapiens
cugaugaucuacccagugg

SEQ ID NO: 2386 - RNA, 19 nt, Homo sapiens
uacccaguggccgagugga

SEQ ID NO: 2387 - RNA, 19 nt, Homo sapiens
acccaguggccgaguggag

SEQ ID NO: 2388 - RNA, 19 nt, Homo sapiens
cccaguggccgaguggagu

SEQ ID NO: 2389 - RNA, 19 nt, Homo sapiens
ccaguggccgaguggagua

SEQ ID NO: 2390 - RNA, 19 nt, Homo sapiens
guggccgaguggaguacau

SEQ ID NO: 2391 - RNA, 19 nt, Homo sapiens
ggccgaguggaguacauca

SEQ ID NO: 2392 - RNA, 19 nt, Homo sapiens
gccgaguggaguacaucac

SEQ ID NO: 2393 - RNA, 19 nt, Homo sapiens
ccgaguggaguacaucaca

SEQ ID NO: 2394 - RNA, 19 nt, Homo sapiens
cgaguggaguacaucacag

SEQ ID NO: 2395 - RNA, 19 nt, Homo sapiens
gaguggaguacaucacagg

SEQ ID NO: 2396 - RNA, 19 nt, Homo sapiens
aguggaguacaucacaggu

SEQ ID NO: 2397 - RNA, 19 nt, Homo sapiens
guggaguacaucacagguc

SEQ ID NO: 2398 - RNA, 19 nt, Homo sapiens
ggaguacaucacagguccu

SEQ ID NO: 2399 - RNA, 19 nt, Homo sapiens
gaguacaucacagguccug

SEQ ID NO: 2400 - RNA, 19 nt, Homo sapiens
guacaucacagguccugga

SEQ ID NO: 2401 - RNA, 19 nt, Homo sapiens
cacagguccuggagugacc

SEQ ID NO: 2402 - RNA, 19 nt, Homo sapiens
acagguccuggagugacca

SEQ ID NO: 2403 - RNA, 19 nt, Homo sapiens
ccuggagugaccaccuaca

SEQ ID NO: 2404 - RNA, 19 nt, Homo sapiens
uggagugaccaccuacaaa

SEQ ID NO: 2405 - RNA, 19 nt, Homo sapiens
ggagugaccaccuacaaag

SEQ ID NO: 2406 - RNA, 19 nt, Homo sapiens
gagugaccaccuacaaagc

SEQ ID NO: 2407 - RNA, 19 nt, Homo sapiens
agugaccaccuacaaagcu

SEQ ID NO: 2408 - RNA, 19 nt, Homo sapiens
ugaccaccuacaaagcugu

SEQ ID NO: 2409 - RNA, 19 nt, Homo sapiens
caccuacaaagcugugauu

SEQ ID NO: 2410 - RNA, 19 nt, Homo sapiens
ccuacaaagcugugauuca

SEQ ID NO: 2411 - RNA, 19 nt, Homo sapiens
cuacaaagcugugauucag

SEQ ID NO: 2412 - RNA, 19 nt, Homo sapiens
acaaagcugugauucagua

SEQ ID NO: 2413 - RNA, 19 nt, Homo sapiens
caaagcugugauucaguac

SEQ ID NO: 2414 - RNA, 19 nt, Homo sapiens
aaagcugugauucaguaca

SEQ ID NO: 2415 - RNA, 19 nt, Homo sapiens
agcugugauucaguacagc

SEQ ID NO: 2416 - RNA, 19 nt, Homo sapiens
gauucaguacagcugugaa

SEQ ID NO: 2417 - RNA, 19 nt, Homo sapiens
uucaguacagcugugaaga

SEQ ID NO: 2418 - RNA, 19 nt, Homo sapiens
ucaguacagcugugaagag

SEQ ID NO: 2419 - RNA, 19 nt, Homo sapiens
caguacagcugugaagaga

SEQ ID NO: 2420 - RNA, 19 nt, Homo sapiens
guacagcugugaagagacc

SEQ ID NO: 2421 - RNA, 19 nt, Homo sapiens
acagcugugaagagaccuu

SEQ ID NO: 2422 - RNA, 19 nt, Homo sapiens
cagcugugaagagaccuuc

SEQ ID NO: 2423 - RNA, 19 nt, Homo sapiens
agcugugaagagaccuucu

SEQ ID NO: 2424 - RNA, 19 nt, Homo sapiens
ugugaagagaccuucuaca

SEQ ID NO: 2425 - RNA, 19 nt, Homo sapiens
gugaagagaccuucuacac

SEQ ID NO: 2426 - RNA, 19 nt, Homo sapiens
ugaagagaccuucuacaca

SEQ ID NO: 2427 - RNA, 19 nt, Homo sapiens
gaagagaccuucuacacaa

SEQ ID NO: 2428 - RNA, 19 nt, Homo sapiens
aagagaccuucuacacaau

SEQ ID NO: 2429 - RNA, 19 nt, Homo sapiens
agagaccuucuacacaaug

SEQ ID NO: 2430 - RNA, 19 nt, Homo sapiens
gagaccuucuacacaauga

SEQ ID NO: 2431 - RNA, 19 nt, Homo sapiens
agaccuucuacacaaugaa

SEQ ID NO: 2432 - RNA, 19 nt, Homo sapiens
gaccuucuacacaaugaaa

SEQ ID NO: 2433 - RNA, 19 nt, Homo sapiens
accuucuacacaaugaaag

SEQ ID NO: 2434 - RNA, 19 nt, Homo sapiens
ccuucuacacaaugaaagu

SEQ ID NO: 2435 - RNA, 19 nt, Homo sapiens
cuucuacacaaugaaagug

SEQ ID NO: 2436 - RNA, 19 nt, Homo sapiens
uucuacacaaugaaaguga

SEQ ID NO: 2437 - RNA, 19 nt, Homo sapiens
ucuacacaaugaaagugaa

SEQ ID NO: 2438 - RNA, 19 nt, Homo sapiens
cuacacaaugaaagugaau

SEQ ID NO: 2439 - RNA, 19 nt, Homo sapiens
acacaaugaaagugaauga

SEQ ID NO: 2440 - RNA, 19 nt, Homo sapiens
cacaaugaaagugaaugau

SEQ ID NO: 2441 - RNA, 19 nt, Homo sapiens
caaugaaagugaaugaugg

SEQ ID NO: 2442 - RNA, 19 nt, Homo sapiens
aaugaaagugaaugauggu

SEQ ID NO: 2443 - RNA, 19 nt, Homo sapiens
augaaagugaaugauggua

SEQ ID NO: 2444 - RNA, 19 nt, Homo sapiens
gaaagugaaugaugguaaa

SEQ ID NO: 2445 - RNA, 19 nt, Homo sapiens
aagugaaugaugguaaaua

SEQ ID NO: 2446 - RNA, 19 nt, Homo sapiens
agugaaugaugguaaauau

SEQ ID NO: 2447 - RNA, 19 nt, Homo sapiens
gugaaugaugguaaauaug

SEQ ID NO: 2448 - RNA, 19 nt, Homo sapiens
ugaaugaugguaaauaugu

SEQ ID NO: 2449 - RNA, 19 nt, Homo sapiens
gaaugaugguaaauaugug

SEQ ID NO: 2450 - RNA, 19 nt, Homo sapiens
gguaaauaugugugugagg

SEQ ID NO: 2451 - RNA, 19 nt, Homo sapiens
auaugugugugaggcugau

SEQ ID NO: 2452 - RNA, 19 nt, Homo sapiens
ugugugugaggcugaugga

SEQ ID NO: 2453 - RNA, 19 nt, Homo sapiens
gugugugaggcugauggau

SEQ ID NO: 2454 - RNA, 19 nt, Homo sapiens
ugugugaggcugauggauu

SEQ ID NO: 2455 - RNA, 19 nt, Homo sapiens
gugugaggcugauggauuc

SEQ ID NO: 2456 - RNA, 19 nt, Homo sapiens
ugugaggcugauggauucu

SEQ ID NO: 2457 - RNA, 19 nt, Homo sapiens
gugaggcugauggauucug

SEQ ID NO: 2458 - RNA, 19 nt, Homo sapiens
gaggcugauggauucugga

SEQ ID NO: 2459 - RNA, 19 nt, Homo sapiens
ggcugauggauucuggacg

SEQ ID NO: 2460 - RNA, 19 nt, Homo sapiens
gcugauggauucuggacga

SEQ ID NO: 2461 - RNA, 19 nt, Homo sapiens
gauggauucuggacgagcu

SEQ ID NO: 2462 - RNA, 19 nt, Homo sapiens
gauucuggacgagcuccaa

SEQ ID NO: 2463 - RNA, 19 nt, Homo sapiens
auucuggacgagcuccaaa

SEQ ID NO: 2464 - RNA, 19 nt, Homo sapiens
cuggacgagcuccaaagga

SEQ ID NO: 2465 - RNA, 19 nt, Homo sapiens
uggacgagcuccaaaggag

SEQ ID NO: 2466 - RNA, 19 nt, Homo sapiens
ggacgagcuccaaaggaga

SEQ ID NO: 2467 - RNA, 19 nt, Homo sapiens
gacgagcuccaaaggagaa

SEQ ID NO: 2468 - RNA, 19 nt, Homo sapiens
cgagcuccaaaggagaaaa

SEQ ID NO: 2469 - RNA, 19 nt, Homo sapiens
gagcuccaaaggagaaaaa

SEQ ID NO: 2470 - RNA, 19 nt, Homo sapiens
agcuccaaaggagaaaaau

SEQ ID NO: 2471 - RNA, 19 nt, Homo sapiens
gcuccaaaggagaaaaauc

SEQ ID NO: 2472 - RNA, 19 nt, Homo sapiens
cuccaaaggagaaaaauca

SEQ ID NO: 2473 - RNA, 19 nt, Homo sapiens
ccaaaggagaaaaaucacu

SEQ ID NO: 2474 - RNA, 19 nt, Homo sapiens
aggagaaaaaucacuccca

SEQ ID NO: 2475 - RNA, 19 nt, Homo sapiens
ggagaaaaaucacucccag

SEQ ID NO: 2476 - RNA, 19 nt, Homo sapiens
agaaaaaucacucccaguc

SEQ ID NO: 2477 - RNA, 19 nt, Homo sapiens
gaaaaaucacucccagucu

SEQ ID NO: 2478 - RNA, 19 nt, Homo sapiens
aaaaaucacucccagucug

SEQ ID NO: 2479 - RNA, 19 nt, Homo sapiens
aaaaucacucccagucugu

SEQ ID NO: 2480 - RNA, 19 nt, Homo sapiens
cucccagucugugagccug

SEQ ID NO: 2481 - RNA, 19 nt, Homo sapiens
ucccagucugugagccugu

SEQ ID NO: 2482 - RNA, 19 nt, Homo sapiens
cccagucugugagccuguu

SEQ ID NO: 2483 - RNA, 19 nt, Homo sapiens
cagucugugagccuguuug

SEQ ID NO: 2484 - RNA, 19 nt, Homo sapiens
cugugagccuguuugugga

SEQ ID NO: 2485 - RNA, 19 nt, Homo sapiens
ugagccuguuuguggacua

SEQ ID NO: 2486 - RNA, 19 nt, Homo sapiens
gccuguuuguggacuauca

SEQ ID NO: 2487 - RNA, 19 nt, Homo sapiens
ccuguuuguggacuaucag

SEQ ID NO: 2488 - RNA, 19 nt, Homo sapiens
cuguuuguggacuaucagc

SEQ ID NO: 2489 - RNA, 19 nt, Homo sapiens
uggacuaucagcccgcaca

SEQ ID NO: 2490 - RNA, 19 nt, Homo sapiens
acuaucagcccgcacaaca

SEQ ID NO: 2491 - RNA, 19 nt, Homo sapiens
cuaucagcccgcacaacag

SEQ ID NO: 2492 - RNA, 19 nt, Homo sapiens
ccgcacaacaggagggcgu

SEQ ID NO: 2493 - RNA, 19 nt, Homo sapiens
cgcacaacaggagggcgua

SEQ ID NO: 2494 - RNA, 19 nt, Homo sapiens
gcacaacaggagggcguau

SEQ ID NO: 2495 - RNA, 19 nt, Homo sapiens
cacaacaggagggcguaua

SEQ ID NO: 2496 - RNA, 19 nt, Homo sapiens
acaacaggagggcguauau

SEQ ID NO: 2497 - RNA, 19 nt, Homo sapiens
caacaggagggcguauaua

SEQ ID NO: 2498 - RNA, 19 nt, Homo sapiens
aacaggagggcguauauau

SEQ ID NO: 2499 - RNA, 19 nt, Homo sapiens
gcguauauauggagggcaa

SEQ ID NO: 2500 - RNA, 19 nt, Homo sapiens
cguauauauggagggcaaa

SEQ ID NO: 2501 - RNA, 19 nt, Homo sapiens
auauggagggcaaaaggca

SEQ ID NO: 2502 - RNA, 19 nt, Homo sapiens
uauggagggcaaaaggcaa

SEQ ID NO: 2503 - RNA, 19 nt, Homo sapiens
ggagggcaaaaggcaaaac

SEQ ID NO: 2504 - RNA, 19 nt, Homo sapiens
agggcaaaaggcaaaaccu

SEQ ID NO: 2505 - RNA, 19 nt, Homo sapiens
gggcaaaaggcaaaaccug

SEQ ID NO: 2506 - RNA, 19 nt, Homo sapiens
ggcaaaaggcaaaaccugg

SEQ ID NO: 2507 - RNA, 19 nt, Homo sapiens
gcaaaaggcaaaaccuggu

SEQ ID NO: 2508 - RNA, 19 nt, Homo sapiens
aaaggcaaaaccuggugau

SEQ ID NO: 2509 - RNA, 19 nt, Homo sapiens
aaggcaaaaccuggugauu

SEQ ID NO: 2510 - RNA, 19 nt, Homo sapiens
aggcaaaaccuggugauuu

SEQ ID NO: 2511 - RNA, 19 nt, Homo sapiens
ggcaaaaccuggugauuuu

SEQ ID NO: 2512 - RNA, 19 nt, Homo sapiens
gcaaaaccuggugauuuuc

SEQ ID NO: 2513 - RNA, 19 nt, Homo sapiens
aaaaccuggugauuuuccu

SEQ ID NO: 2514 - RNA, 19 nt, Homo sapiens
aaaccuggugauuuuccuu

SEQ ID NO: 2515 - RNA, 19 nt, Homo sapiens
accuggugauuuuccuugg

SEQ ID NO: 2516 - RNA, 19 nt, Homo sapiens
ccuggugauuuuccuuggc

SEQ ID NO: 2517 - RNA, 19 nt, Homo sapiens
cuggugauuuuccuuggca

SEQ ID NO: 2518 - RNA, 19 nt, Homo sapiens
uggugauuuuccuuggcaa

SEQ ID NO: 2519 - RNA, 19 nt, Homo sapiens
ggugauuuuccuuggcaag

SEQ ID NO: 2520 - RNA, 19 nt, Homo sapiens
gugauuuuccuuggcaagu

SEQ ID NO: 2521 - RNA, 19 nt, Homo sapiens
ugauuuuccuuggcaaguc

SEQ ID NO: 2522 - RNA, 19 nt, Homo sapiens
gauuuuccuuggcaagucc

SEQ ID NO: 2523 - RNA, 19 nt, Homo sapiens
uccuuggcaaguccugaua

SEQ ID NO: 2524 - RNA, 19 nt, Homo sapiens
ccuuggcaaguccugauau

SEQ ID NO: 2525 - RNA, 19 nt, Homo sapiens
cuuggcaaguccugauauu

SEQ ID NO: 2526 - RNA, 19 nt, Homo sapiens
uuggcaaguccugauauua

SEQ ID NO: 2527 - RNA, 19 nt, Homo sapiens
ggcaaguccugauauuagg

SEQ ID NO: 2528 - RNA, 19 nt, Homo sapiens
gcaaguccugauauuaggu

SEQ ID NO: 2529 - RNA, 19 nt, Homo sapiens
aguccugauauuaggugga

SEQ ID NO: 2530 - RNA, 19 nt, Homo sapiens
guccugauauuagguggaa

SEQ ID NO: 2531 - RNA, 19 nt, Homo sapiens
uccugauauuagguggaac

SEQ ID NO: 2532 - RNA, 19 nt, Homo sapiens
ccugauauuagguggaacc

SEQ ID NO: 2533 - RNA, 19 nt, Homo sapiens
gauauuagguggaaccaca

SEQ ID NO: 2534 - RNA, 19 nt, Homo sapiens
auuagguggaaccacagca

SEQ ID NO: 2535 - RNA, 19 nt, Homo sapiens
uuagguggaaccacagcag

SEQ ID NO: 2536 - RNA, 19 nt, Homo sapiens
agguggaaccacagcagca

SEQ ID NO: 2537 - RNA, 19 nt, Homo sapiens
gguggaaccacagcagcag

SEQ ID NO: 2538 - RNA, 19 nt, Homo sapiens
guggaaccacagcagcagg

SEQ ID NO: 2539 - RNA, 19 nt, Homo sapiens
gaaccacagcagcaggugc

SEQ ID NO: 2540 - RNA, 19 nt, Homo sapiens
aaccacagcagcaggugca

SEQ ID NO: 2541 - RNA, 19 nt, Homo sapiens
accacagcagcaggugcac

SEQ ID NO: 2542 - RNA, 19 nt, Homo sapiens
ccacagcagcaggugcacu

SEQ ID NO: 2543 - RNA, 19 nt, Homo sapiens
cacagcagcaggugcacuu

SEQ ID NO: 2544 - RNA, 19 nt, Homo sapiens
acagcagcaggugcacuuu

SEQ ID NO: 2545 - RNA, 19 nt, Homo sapiens
cagcagcaggugcacuuuu

SEQ ID NO: 2546 - RNA, 19 nt, Homo sapiens
agcagcaggugcacuuuua

SEQ ID NO: 2547 - RNA, 19 nt, Homo sapiens
cagcaggugcacuuuuaua

SEQ ID NO: 2548 - RNA, 19 nt, Homo sapiens
agcaggugcacuuuuauau

SEQ ID NO: 2549 - RNA, 19 nt, Homo sapiens
gcaggugcacuuuuauaug

SEQ ID NO: 2550 - RNA, 19 nt, Homo sapiens
caggugcacuuuuauauga

SEQ ID NO: 2551 - RNA, 19 nt, Homo sapiens
aggugcacuuuuauaugac

SEQ ID NO: 2552 - RNA, 19 nt, Homo sapiens
ggugcacuuuuauaugaca

SEQ ID NO: 2553 - RNA, 19 nt, Homo sapiens
gugcacuuuuauaugacaa

SEQ ID NO: 2554 - RNA, 19 nt, Homo sapiens
gcacuuuuauaugacaacu

SEQ ID NO: 2555 - RNA, 19 nt, Homo sapiens
cacuuuuauaugacaacug

SEQ ID NO: 2556 - RNA, 19 nt, Homo sapiens
auaugacaacuggguccua

SEQ ID NO: 2557 - RNA, 19 nt, Homo sapiens
uaugacaacuggguccuaa

SEQ ID NO: 2558 - RNA, 19 nt, Homo sapiens
caacuggguccuaacagcu

SEQ ID NO: 2559 - RNA, 19 nt, Homo sapiens
aacuggguccuaacagcug

SEQ ID NO: 2560 - RNA, 19 nt, Homo sapiens
acuggguccuaacagcugc

SEQ ID NO: 2561 - RNA, 19 nt, Homo sapiens
ggguccuaacagcugcuca

SEQ ID NO: 2562 - RNA, 19 nt, Homo sapiens
gguccuaacagcugcucau

SEQ ID NO: 2563 - RNA, 19 nt, Homo sapiens
acagcugcucaugccgucu

SEQ ID NO: 2564 - RNA, 19 nt, Homo sapiens
agcugcucaugccgucuau

SEQ ID NO: 2565 - RNA, 19 nt, Homo sapiens
cugcucaugccgucuauga

SEQ ID NO: 2566 - RNA, 19 nt, Homo sapiens
ucaugccgucuaugagcaa

SEQ ID NO: 2567 - RNA, 19 nt, Homo sapiens
ugccgucuaugagcaaaaa

SEQ ID NO: 2568 - RNA, 19 nt, Homo sapiens
ccgucuaugagcaaaaaca

SEQ ID NO: 2569 - RNA, 19 nt, Homo sapiens
cgucuaugagcaaaaacau

SEQ ID NO: 2570 - RNA, 19 nt, Homo sapiens
ucuaugagcaaaaacauga

SEQ ID NO: 2571 - RNA, 19 nt, Homo sapiens
cuaugagcaaaaacaugau

SEQ ID NO: 2572 - RNA, 19 nt, Homo sapiens
ugagcaaaaacaugaugca

SEQ ID NO: 2573 - RNA, 19 nt, Homo sapiens
gagcaaaaacaugaugcau

SEQ ID NO: 2574 - RNA, 19 nt, Homo sapiens
gcaaaaacaugaugcaucc

SEQ ID NO: 2575 - RNA, 19 nt, Homo sapiens
gaugcauccgcccuggaca

SEQ ID NO: 2576 - RNA, 19 nt, Homo sapiens
augcauccgcccuggacau

SEQ ID NO: 2577 - RNA, 19 nt, Homo sapiens
cccuggacauucgaauggg

SEQ ID NO: 2578 - RNA, 19 nt, Homo sapiens
ggacauucgaaugggcacc

SEQ ID NO: 2579 - RNA, 19 nt, Homo sapiens
acauucgaaugggcacccu

SEQ ID NO: 2580 - RNA, 19 nt, Homo sapiens
cauucgaaugggcacccug

SEQ ID NO: 2581 - RNA, 19 nt, Homo sapiens
auucgaaugggcacccuga

SEQ ID NO: 2582 - RNA, 19 nt, Homo sapiens
uucgaaugggcacccugaa

SEQ ID NO: 2583 - RNA, 19 nt, Homo sapiens
ucgaaugggcacccugaaa

SEQ ID NO: 2584 - RNA, 19 nt, Homo sapiens
cgaaugggcacccugaaaa

SEQ ID NO: 2585 - RNA, 19 nt, Homo sapiens
gaaugggcacccugaaaag

SEQ ID NO: 2586 - RNA, 19 nt, Homo sapiens
ugggcacccugaaaagacu

SEQ ID NO: 2587 - RNA, 19 nt, Homo sapiens
gggcacccugaaaagacua

SEQ ID NO: 2588 - RNA, 19 nt, Homo sapiens
ggcacccugaaaagacuau

SEQ ID NO: 2589 - RNA, 19 nt, Homo sapiens
gcacccugaaaagacuauc

SEQ ID NO: 2590 - RNA, 19 nt, Homo sapiens
cacccugaaaagacuauca

SEQ ID NO: 2591 - RNA, 19 nt, Homo sapiens
acccugaaaagacuaucac

SEQ ID NO: 2592 - RNA, 19 nt, Homo sapiens
cccugaaaagacuaucacc

SEQ ID NO: 2593 - RNA, 19 nt, Homo sapiens
ccugaaaagacuaucaccu

SEQ ID NO: 2594 - RNA, 19 nt, Homo sapiens
cugaaaagacuaucaccuc

SEQ ID NO: 2595 - RNA, 19 nt, Homo sapiens
ugaaaagacuaucaccuca

SEQ ID NO: 2596 - RNA, 19 nt, Homo sapiens
gaaaagacuaucaccucau

SEQ ID NO: 2597 - RNA, 19 nt, Homo sapiens
aagacuaucaccucauuau

SEQ ID NO: 2598 - RNA, 19 nt, Homo sapiens
agacuaucaccucauuaua

SEQ ID NO: 2599 - RNA, 19 nt, Homo sapiens
gacuaucaccucauuauac

SEQ ID NO: 2600 - RNA, 19 nt, Homo sapiens
acuaucaccucauuauaca

SEQ ID NO: 2601 - RNA, 19 nt, Homo sapiens
cuaucaccucauuauacac

SEQ ID NO: 2602 - RNA, 19 nt, Homo sapiens
aucaccucauuauacacaa

SEQ ID NO: 2603 - RNA, 19 nt, Homo sapiens
ucaccucauuauacacaag

SEQ ID NO: 2604 - RNA, 19 nt, Homo sapiens
accucauuauacacaagcc

SEQ ID NO: 2605 - RNA, 19 nt, Homo sapiens
ccucauuauacacaagccu

SEQ ID NO: 2606 - RNA, 19 nt, Homo sapiens
cucauuauacacaagccug

SEQ ID NO: 2607 - RNA, 19 nt, Homo sapiens
ucauuauacacaagccugg

SEQ ID NO: 2608 - RNA, 19 nt, Homo sapiens
cauuauacacaagccuggu

SEQ ID NO: 2609 - RNA, 19 nt, Homo sapiens
auuauacacaagccugguc

SEQ ID NO: 2610 - RNA, 19 nt, Homo sapiens
uuauacacaagccuggucu

SEQ ID NO: 2611 - RNA, 19 nt, Homo sapiens
uauacacaagccuggucug

SEQ ID NO: 2612 - RNA, 19 nt, Homo sapiens
auacacaagccuggucuga

SEQ ID NO: 2613 - RNA, 19 nt, Homo sapiens
uacacaagccuggucugaa

SEQ ID NO: 2614 - RNA, 19 nt, Homo sapiens
acacaagccuggucugaag

SEQ ID NO: 2615 - RNA, 19 nt, Homo sapiens
cacaagccuggucugaagc

SEQ ID NO: 2616 - RNA, 19 nt, Homo sapiens
acaagccuggucugaagcu

SEQ ID NO: 2617 - RNA, 19 nt, Homo sapiens
caagccuggucugaagcug

SEQ ID NO: 2618 - RNA, 19 nt, Homo sapiens
aagccuggucugaagcugu

SEQ ID NO: 2619 - RNA, 19 nt, Homo sapiens
agccuggucugaagcuguu

SEQ ID NO: 2620 - RNA, 19 nt, Homo sapiens
gccuggucugaagcuguuu

SEQ ID NO: 2621 - RNA, 19 nt, Homo sapiens
ccuggucugaagcuguuuu

SEQ ID NO: 2622 - RNA, 19 nt, Homo sapiens
cuggucugaagcuguuuuu

SEQ ID NO: 2623 - RNA, 19 nt, Homo sapiens
uggucugaagcuguuuuua

SEQ ID NO: 2624 - RNA, 19 nt, Homo sapiens
ggucugaagcuguuuuuau

SEQ ID NO: 2625 - RNA, 19 nt, Homo sapiens
gucugaagcuguuuuuaua

SEQ ID NO: 2626 - RNA, 19 nt, Homo sapiens
cugaagcuguuuuuauaca

SEQ ID NO: 2627 - RNA, 19 nt, Homo sapiens
ugaagcuguuuuuauacau

SEQ ID NO: 2628 - RNA, 19 nt, Homo sapiens
gaagcuguuuuuauacaug

SEQ ID NO: 2629 - RNA, 19 nt, Homo sapiens
aagcuguuuuuauacauga

SEQ ID NO: 2630 - RNA, 19 nt, Homo sapiens
uuuuauacaugaagguuau

SEQ ID NO: 2631 - RNA, 19 nt, Homo sapiens
uauacaugaagguuauacu

SEQ ID NO: 2632 - RNA, 19 nt, Homo sapiens
acaugaagguuauacucau

SEQ ID NO: 2633 - RNA, 19 nt, Homo sapiens
ugaagguuauacucaugau

SEQ ID NO: 2634 - RNA, 19 nt, Homo sapiens
gaagguuauacucaugaug

SEQ ID NO: 2635 - RNA, 19 nt, Homo sapiens
agguuauacucaugaugcu

SEQ ID NO: 2636 - RNA, 19 nt, Homo sapiens
guuauacucaugaugcugg

SEQ ID NO: 2637 - RNA, 19 nt, Homo sapiens
uacucaugaugcuggcuuu

SEQ ID NO: 2638 - RNA, 19 nt, Homo sapiens
acucaugaugcuggcuuug

SEQ ID NO: 2639 - RNA, 19 nt, Homo sapiens
cucaugaugcuggcuuuga

SEQ ID NO: 2640 - RNA, 19 nt, Homo sapiens
ucaugaugcuggcuuugac

SEQ ID NO: 2641 - RNA, 19 nt, Homo sapiens
caugaugcuggcuuugaca

SEQ ID NO: 2642 - RNA, 19 nt, Homo sapiens
augaugcuggcuuugacaa

SEQ ID NO: 2643 - RNA, 19 nt, Homo sapiens
ugaugcuggcuuugacaau

SEQ ID NO: 2644 - RNA, 19 nt, Homo sapiens
gaugcuggcuuugacaaug

SEQ ID NO: 2645 - RNA, 19 nt, Homo sapiens
augcuggcuuugacaauga

SEQ ID NO: 2646 - RNA, 19 nt, Homo sapiens
gcuggcuuugacaaugaca

SEQ ID NO: 2647 - RNA, 19 nt, Homo sapiens
cuggcuuugacaaugacau

SEQ ID NO: 2648 - RNA, 19 nt, Homo sapiens
uggcuuugacaaugacaua

SEQ ID NO: 2649 - RNA, 19 nt, Homo sapiens
ggcuuugacaaugacauag

SEQ ID NO: 2650 - RNA, 19 nt, Homo sapiens
gcuuugacaaugacauagc

SEQ ID NO: 2651 - RNA, 19 nt, Homo sapiens
cuuugacaaugacauagca

SEQ ID NO: 2652 - RNA, 19 nt, Homo sapiens
uugacaaugacauagcacu

SEQ ID NO: 2653 - RNA, 19 nt, Homo sapiens
gacaaugacauagcacuga

SEQ ID NO: 2654 - RNA, 19 nt, Homo sapiens
acaaugacauagcacugau

SEQ ID NO: 2655 - RNA, 19 nt, Homo sapiens
caaugacauagcacugauu

SEQ ID NO: 2656 - RNA, 19 nt, Homo sapiens
aaugacauagcacugauua

SEQ ID NO: 2657 - RNA, 19 nt, Homo sapiens
augacauagcacugauuaa

SEQ ID NO: 2658 - RNA, 19 nt, Homo sapiens
ugacauagcacugauuaaa

SEQ ID NO: 2659 - RNA, 19 nt, Homo sapiens
gacauagcacugauuaaau

SEQ ID NO: 2660 - RNA, 19 nt, Homo sapiens
acauagcacugauuaaauu

SEQ ID NO: 2661 - RNA, 19 nt, Homo sapiens
cauagcacugauuaaauug

SEQ ID NO: 2662 - RNA, 19 nt, Homo sapiens
auagcacugauuaaauuga

SEQ ID NO: 2663 - RNA, 19 nt, Homo sapiens
uagcacugauuaaauugaa

SEQ ID NO: 2664 - RNA, 19 nt, Homo sapiens
agcacugauuaaauugaau

SEQ ID NO: 2665 - RNA, 19 nt, Homo sapiens
gcacugauuaaauugaaua

SEQ ID NO: 2666 - RNA, 19 nt, Homo sapiens
cacugauuaaauugaauaa

SEQ ID NO: 2667 - RNA, 19 nt, Homo sapiens
cugauuaaauugaauaaca

SEQ ID NO: 2668 - RNA, 19 nt, Homo sapiens
ugauuaaauugaauaacaa

SEQ ID NO: 2669 - RNA, 19 nt, Homo sapiens
gauuaaauugaauaacaaa

SEQ ID NO: 2670 - RNA, 19 nt, Homo sapiens
aauugaauaacaaaguugu

SEQ ID NO: 2671 - RNA, 19 nt, Homo sapiens
aauaacaaaguuguaauca

SEQ ID NO: 2672 - RNA, 19 nt, Homo sapiens
auaacaaaguuguaaucaa

SEQ ID NO: 2673 - RNA, 19 nt, Homo sapiens
uaacaaaguuguaaucaau

SEQ ID NO: 2674 - RNA, 19 nt, Homo sapiens
aacaaaguuguaaucaaua

SEQ ID NO: 2675 - RNA, 19 nt, Homo sapiens
aaguuguaaucaauagcaa

SEQ ID NO: 2676 - RNA, 19 nt, Homo sapiens
guuguaaucaauagcaaca

SEQ ID NO: 2677 - RNA, 19 nt, Homo sapiens
guaaucaauagcaacauca

SEQ ID NO: 2678 - RNA, 19 nt, Homo sapiens
aaucaauagcaacaucacg

SEQ ID NO: 2679 - RNA, 19 nt, Homo sapiens
cuauuugucugccaagaaa

SEQ ID NO: 2680 - RNA, 19 nt, Homo sapiens
uauuugucugccaagaaaa

SEQ ID NO: 2681 - RNA, 19 nt, Homo sapiens
auuugucugccaagaaaag

SEQ ID NO: 2682 - RNA, 19 nt, Homo sapiens
ugccaagaaaagaagcuga

SEQ ID NO: 2683 - RNA, 19 nt, Homo sapiens
ccaagaaaagaagcugaau

SEQ ID NO: 2684 - RNA, 19 nt, Homo sapiens
gaagcugaauccuuuauga

SEQ ID NO: 2685 - RNA, 19 nt, Homo sapiens
gcugaauccuuuaugagga

SEQ ID NO: 2686 - RNA, 19 nt, Homo sapiens
cugaauccuuuaugaggac

SEQ ID NO: 2687 - RNA, 19 nt, Homo sapiens
aggacagaugacauuggaa

SEQ ID NO: 2688 - RNA, 19 nt, Homo sapiens
ggacagaugacauuggaac

SEQ ID NO: 2689 - RNA, 19 nt, Homo sapiens
cauuggaacugcaucugga

SEQ ID NO: 2690 - RNA, 19 nt, Homo sapiens
aacugcaucuggaugggga

SEQ ID NO: 2691 - RNA, 19 nt, Homo sapiens
cugcaucuggauggggauu

SEQ ID NO: 2692 - RNA, 19 nt, Homo sapiens
ggauggggauuaacccaaa

SEQ ID NO: 2693 - RNA, 19 nt, Homo sapiens
gggguuuucuugcuagaaa

SEQ ID NO: 2694 - RNA, 19 nt, Homo sapiens
ggguuuucuugcuagaaau

SEQ ID NO: 2695 - RNA, 19 nt, Homo sapiens
gguuuucuugcuagaaauc

SEQ ID NO: 2696 - RNA, 19 nt, Homo sapiens
guuuucuugcuagaaaucu

SEQ ID NO: 2697 - RNA, 19 nt, Homo sapiens
uuuucuugcuagaaaucua

SEQ ID NO: 2698 - RNA, 19 nt, Homo sapiens
uuucuugcuagaaaucuaa

SEQ ID NO: 2699 - RNA, 19 nt, Homo sapiens
cuugcuagaaaucuaaugu

SEQ ID NO: 2700 - RNA, 19 nt, Homo sapiens
uugcuagaaaucuaaugua

SEQ ID NO: 2701 - RNA, 19 nt, Homo sapiens
ugcuagaaaucuaauguau

SEQ ID NO: 2702 - RNA, 19 nt, Homo sapiens
aucuaauguaugucgacau

SEQ ID NO: 2703 - RNA, 19 nt, Homo sapiens
ucuaauguaugucgacaua

SEQ ID NO: 2704 - RNA, 19 nt, Homo sapiens
uaauguaugucgacauacc

SEQ ID NO: 2705 - RNA, 19 nt, Homo sapiens
auguaugucgacauaccga

SEQ ID NO: 2706 - RNA, 19 nt, Homo sapiens
uguaugucgacauaccgau

SEQ ID NO: 2707 - RNA, 19 nt, Homo sapiens
augucgacauaccgauugu

SEQ ID NO: 2708 - RNA, 19 nt, Homo sapiens
ugucgacauaccgauuguu

SEQ ID NO: 2709 - RNA, 19 nt, Homo sapiens
ccgauuguugaccaucaaa

SEQ ID NO: 2710 - RNA, 19 nt, Homo sapiens
cgauuguugaccaucaaaa

SEQ ID NO: 2711 - RNA, 19 nt, Homo sapiens
gauuguugaccaucaaaaa

SEQ ID NO: 2712 - RNA, 19 nt, Homo sapiens
uguugaccaucaaaaaugu

SEQ ID NO: 2713 - RNA, 19 nt, Homo sapiens
guugaccaucaaaaaugua

SEQ ID NO: 2714 - RNA, 19 nt, Homo sapiens
uugaccaucaaaaauguac

SEQ ID NO: 2715 - RNA, 19 nt, Homo sapiens
aaaauguacugcugcauau

SEQ ID NO: 2716 - RNA, 19 nt, Homo sapiens
uguacugcugcauaugaaa

SEQ ID NO: 2717 - RNA, 19 nt, Homo sapiens
cugcugcauaugaaaagcc

SEQ ID NO: 2718 - RNA, 19 nt, Homo sapiens
ugcugcauaugaaaagcca

SEQ ID NO: 2719 - RNA, 19 nt, Homo sapiens
gcugcauaugaaaagccac

SEQ ID NO: 2720 - RNA, 19 nt, Homo sapiens
cauaugaaaagccacccua

SEQ ID NO: 2721 - RNA, 19 nt, Homo sapiens
ccacccuauccaaggggaa

SEQ ID NO: 2722 - RNA, 19 nt, Homo sapiens
uauccaaggggaaguguaa

SEQ ID NO: 2723 - RNA, 19 nt, Homo sapiens
uccaaggggaaguguaacu

SEQ ID NO: 2724 - RNA, 19 nt, Homo sapiens
aaguguaacugcuaacaug

SEQ ID NO: 2725 - RNA, 19 nt, Homo sapiens
guguaacugcuaacaugcu

SEQ ID NO: 2726 - RNA, 19 nt, Homo sapiens
cugcuaacaugcuuugugc

SEQ ID NO: 2727 - RNA, 19 nt, Homo sapiens
ugcuaacaugcuuugugcu

SEQ ID NO: 2728 - RNA, 19 nt, Homo sapiens
caugcuuugugcuggcuua

SEQ ID NO: 2729 - RNA, 19 nt, Homo sapiens
ugcuuugugcuggcuuaga

SEQ ID NO: 2730 - RNA, 19 nt, Homo sapiens
gcuuugugcuggcuuagaa

SEQ ID NO: 2731 - RNA, 19 nt, Homo sapiens
aggacagcugcagagguga

SEQ ID NO: 2732 - RNA, 19 nt, Homo sapiens
ugcagaggugacagcggag

SEQ ID NO: 2733 - RNA, 19 nt, Homo sapiens
gggcacugguguuucuaga

SEQ ID NO: 2734 - RNA, 19 nt, Homo sapiens
gcacugguguuucuagaua

SEQ ID NO: 2735 - RNA, 19 nt, Homo sapiens
ugguguuucuagauaguga

SEQ ID NO: 2736 - RNA, 19 nt, Homo sapiens
guuucuagauagugaaaca

SEQ ID NO: 2737 - RNA, 19 nt, Homo sapiens
gugaaacagagaggugguu

SEQ ID NO: 2738 - RNA, 19 nt, Homo sapiens
gaaacagagaggugguuug

SEQ ID NO: 2739 - RNA, 19 nt, Homo sapiens
gagaggugguuugugggag

SEQ ID NO: 2740 - RNA, 19 nt, Homo sapiens
ggugguuugugggaggaau

SEQ ID NO: 2741 - RNA, 19 nt, Homo sapiens
gaggaauaguguccugggg

SEQ ID NO: 2742 - RNA, 19 nt, Homo sapiens
aggaauaguguccuggggu

SEQ ID NO: 2743 - RNA, 19 nt, Homo sapiens
uaguguccugggguuccau

SEQ ID NO: 2744 - RNA, 19 nt, Homo sapiens
ggguuccaugaauuguggg

SEQ ID NO: 2745 - RNA, 19 nt, Homo sapiens
caugaauuguggggaagca

SEQ ID NO: 2746 - RNA, 19 nt, Homo sapiens
uguggggaagcaggucagu

SEQ ID NO: 2747 - RNA, 19 nt, Homo sapiens
gcaggucaguauggagucu

SEQ ID NO: 2748 - RNA, 19 nt, Homo sapiens
caggucaguauggagucua

SEQ ID NO: 2749 - RNA, 19 nt, Homo sapiens
aggucaguauggagucuac

SEQ ID NO: 2750 - RNA, 19 nt, Homo sapiens
ggucaguauggagucuaca

SEQ ID NO: 2751 - RNA, 19 nt, Homo sapiens
ucaguauggagucuacaca

SEQ ID NO: 2752 - RNA, 19 nt, Homo sapiens
caguauggagucuacacaa

SEQ ID NO: 2753 - RNA, 19 nt, Homo sapiens
aguauggagucuacacaaa

SEQ ID NO: 2754 - RNA, 19 nt, Homo sapiens
uauggagucuacacaaaag

SEQ ID NO: 2755 - RNA, 19 nt, Homo sapiens
ggagucuacacaaaaguua

SEQ ID NO: 2756 - RNA, 19 nt, Homo sapiens
gagucuacacaaaaguuau

SEQ ID NO: 2757 - RNA, 19 nt, Homo sapiens
cuacacaaaaguuauuaac

SEQ ID NO: 2758 - RNA, 19 nt, Homo sapiens
uuauuaacuauauucccug

SEQ ID NO: 2759 - RNA, 19 nt, Homo sapiens
cuauauucccuggaucgag

SEQ ID NO: 2760 - RNA, 19 nt, Homo sapiens
auauucccuggaucgagaa

SEQ ID NO: 2761 - RNA, 19 nt, Homo sapiens
cccuggaucgagaacauaa

SEQ ID NO: 2762 - RNA, 19 nt, Homo sapiens
cuggaucgagaacauaauu

SEQ ID NO: 2763 - RNA, 19 nt, Homo sapiens
gaucgagaacauaauuagu

SEQ ID NO: 2764 - RNA, 19 nt, Homo sapiens
ucgagaacauaauuaguga

SEQ ID NO: 2765 - RNA, 19 nt, Homo sapiens
cgagaacauaauuagugau

SEQ ID NO: 2766 - RNA, 19 nt, Homo sapiens
acauaauuagugauuuuua

SEQ ID NO: 2767 - RNA, 19 nt, Homo sapiens
cauaauuagugauuuuuaa

SEQ ID NO: 2768 - RNA, 19 nt, Homo sapiens
auaauuagugauuuuuaac

SEQ ID NO: 2769 - RNA, 19 nt, Homo sapiens
cuugcgugucugcagucaa

SEQ ID NO: 2770 - RNA, 19 nt, Homo sapiens
gcgugucugcagucaagga

SEQ ID NO: 2771 - RNA, 19 nt, Homo sapiens
cugcagucaaggauucuuc

SEQ ID NO: 2772 - RNA, 19 nt, Homo sapiens
gcagucaaggauucuucau

SEQ ID NO: 2773 - RNA, 19 nt, Homo sapiens
gucaaggauucuucauuuu

SEQ ID NO: 2774 - RNA, 19 nt, Homo sapiens
caaggauucuucauuuuua

SEQ ID NO: 2775 - RNA, 19 nt, Homo sapiens
auucuucauuuuuagaaau

SEQ ID NO: 2776 - RNA, 19 nt, Homo sapiens
gaccuuggcagcgacgugg

SEQ ID NO: 2777 - RNA, 19 nt, Homo sapiens
agcgacguggcucgagaag

SEQ ID NO: 2778 - RNA, 19 nt, Homo sapiens
gcucgagaagcauucauca

SEQ ID NO: 2779 - RNA, 19 nt, Homo sapiens
gcauucaucauuacugugg

SEQ ID NO: 2780 - RNA, 19 nt, Homo sapiens
cauucaucauuacugugga

SEQ ID NO: 2781 - RNA, 19 nt, Homo sapiens
caucauuacuguggacaug

SEQ ID NO: 2782 - RNA, 19 nt, Homo sapiens
aucauuacuguggacaugg

SEQ ID NO: 2783 - RNA, 19 nt, Homo sapiens
cauuacuguggacauggca

SEQ ID NO: 2784 - RNA, 19 nt, Homo sapiens
aguuguugcuccacccaaa

SEQ ID NO: 2785 - RNA, 19 nt, Homo sapiens
uccaggugaggcugcuguc

SEQ ID NO: 2786 - RNA, 19 nt, Homo sapiens
gugaggcugcugucauuuc

SEQ ID NO: 2787 - RNA, 19 nt, Homo sapiens
cugcugucauuucuccacu

SEQ ID NO: 2788 - RNA, 19 nt, Homo sapiens
cugucauuucuccacuugc

SEQ ID NO: 2789 - RNA, 19 nt, Homo sapiens
cauuucuccacuugccagu

SEQ ID NO: 2790 - RNA, 19 nt, Homo sapiens
ucuccacuugccaguuuaa

SEQ ID NO: 2791 - RNA, 19 nt, Homo sapiens
cuccacuugccaguuuaau

SEQ ID NO: 2792 - RNA, 19 nt, Homo sapiens
guuuaauuccagccuuacc

SEQ ID NO: 2793 - RNA, 19 nt, Homo sapiens
uuccagccuuacccauuga

SEQ ID NO: 2794 - RNA, 19 nt, Homo sapiens
cauugacucaaggggacau

SEQ ID NO: 2795 - RNA, 19 nt, Homo sapiens
auugacucaaggggacaua

SEQ ID NO: 2796 - RNA, 19 nt, Homo sapiens
aaggggacauaaaccacga

SEQ ID NO: 2797 - RNA, 19 nt, Homo sapiens
ggggacauaaaccacgaga

SEQ ID NO: 2798 - RNA, 19 nt, Homo sapiens
ggacauaaaccacgagagu

SEQ ID NO: 2799 - RNA, 19 nt, Homo sapiens
gacauaaaccacgagagug

SEQ ID NO: 2800 - RNA, 19 nt, Homo sapiens
cauaaaccacgagagugac

SEQ ID NO: 2801 - RNA, 19 nt, Homo sapiens
auaaaccacgagagugaca

SEQ ID NO: 2802 - RNA, 19 nt, Homo sapiens
ccacgagagugacagucau

SEQ ID NO: 2803 - RNA, 19 nt, Homo sapiens
cgagagugacagucaucuu

SEQ ID NO: 2804 - RNA, 19 nt, Homo sapiens
aucuuugcccacccagugu

SEQ ID NO: 2805 - RNA, 19 nt, Homo sapiens
cuuugcccacccaguguaa

SEQ ID NO: 2806 - RNA, 19 nt, Homo sapiens
ugcccacccaguguaaugu

SEQ ID NO: 2807 - RNA, 19 nt, Homo sapiens
gcccacccaguguaauguc

SEQ ID NO: 2808 - RNA, 19 nt, Homo sapiens
ccacccaguguaaugucac

SEQ ID NO: 2809 - RNA, 19 nt, Homo sapiens
acccaguguaaugucacug

SEQ ID NO: 2810 - RNA, 19 nt, Homo sapiens
cccaguguaaugucacugc

SEQ ID NO: 2811 - RNA, 19 nt, Homo sapiens
ccaguguaaugucacugcu

SEQ ID NO: 2812 - RNA, 19 nt, Homo sapiens
gcucaaauuacauuucauu

SEQ ID NO: 2813 - RNA, 19 nt, Homo sapiens
aauuacauuucauuaccuu

SEQ ID NO: 2814 - RNA, 19 nt, Homo sapiens
auuacauuucauuaccuua

SEQ ID NO: 2815 - RNA, 19 nt, Homo sapiens
acauuucauuaccuuaaaa

SEQ ID NO: 2816 - RNA, 19 nt, Homo sapiens
cauuucauuaccuuaaaaa

SEQ ID NO: 2817 - RNA, 19 nt, Homo sapiens
ucauuaccuuaaaaagcca

SEQ ID NO: 2818 - RNA, 19 nt, Homo sapiens
gcuguuggcauuucuguaa

SEQ ID NO: 2819 - RNA, 19 nt, Homo sapiens
cuguuggcauuucuguaaa

SEQ ID NO: 2820 - RNA, 19 nt, Homo sapiens
guuggcauuucuguaaacu

SEQ ID NO: 2821 - RNA, 19 nt, Homo sapiens
uguaaacugccuguccaug

SEQ ID NO: 2822 - RNA, 19 nt, Homo sapiens
guaaacugccuguccaugc

SEQ ID NO: 2823 - RNA, 19 nt, Homo sapiens
uaaacugccuguccaugcu

SEQ ID NO: 2824 - RNA, 19 nt, Homo sapiens
uguccaugcucuuuguuuu

SEQ ID NO: 2825 - RNA, 19 nt, Homo sapiens
caugcucuuuguuuuuaaa

SEQ ID NO: 2826 - RNA, 19 nt, Homo sapiens
ucuuuguuuuuaaacuugu

SEQ ID NO: 2827 - DNA, 2471 bp, Homo sapiens
agaccaggccaggccagctggacgggcacaccatgaggctgctgaccctcctgggccttctgtgtggctcggtggccacccccttgggcccgaagtggcctgaacctgtgttcgggcgcctggcatcccccggctttccaggggagtatgccaatgaccaggagcggcgctggaccctgactgcaccccccggctaccgcctgcgcctctacttcacccacttcgacctggagctctcccacctctgcgagtacgacttcgtcaagctgagctcgggggccaaggtgctggccacgctgtgcgggcaggagagcacagacacggagcgggcccctggcaaggacactttctactcgctgggctccagcctggacattaccttccgctccgactactccaacgagaagccgttcacggggttcgaggccttctatgcagccgaggacattgacgagtgccaggtggccccgggagaggcgcccacctgcgaccaccactgccacaaccacctgggcggtttctactgctcctgccgcgcaggctacgtcctgcaccgtaacaagcgcacctgctcagccctgtgctccggccaggtcttcacccagaggtctggggagctcagcagccctgaatacccacggccgtatcccaaactctccagttgcacttacagcatcagcctggaggaggggttcagtgtcattctggactttgtggagtccttcgatgtggagacacaccctgaaaccctgtgtccctacgactttctcaagattcaaacagacagagaagaacatggcccattctgtgggaagacattgccccacaggattgaaacaaaaagcaacacggtgaccatcacctttgtcacagatgaatcaggagaccacacaggctggaagatccactacacgagcacagcgcagccttgcccttatccgatggcgccacctaatggccacgtttcacctgtgcaagccaaatacatcctgaaagacagcttctccatcttttgcgagactggctatgagcttctgcaaggtcacttgcccctgaaatcctttactgcagtttgtcagaaagatggatcttgggaccggccaatgcccgcgtgcagcattgttgactgtggccctcctgatgatctacccagtggccgagtggagtacatcacaggtcctggagtgaccacctacaaagctgtgattcagtacagctgtgaagagaccttctacacaatgaaagtgaatgatggtaaatatgtgtgtgaggctgatggattctggacgagctccaaaggagaaaaatcactcccagtctgtgagcctgtttgtggactatcagcccgcacaacaggagggcgtatatatggagggcaaaaggcaaaacctggtgattttccttggcaagtcctgatattaggtggaaccacagcagcaggtgcacttttatatgacaactgggtcctaacagctgctcatgccgtctatgagcaaaaacatgatgcatccgccctggacattcgaatgggcaccctgaaaagactatcacctcattatacacaagcctggtctgaagctgtttttatacatgaaggttatactcatgatgctggctttgacaatgacatagcactgattaaattgaataacaaagttgtaatcaatagcaacatcacgcctatttgtctgccaagaaaagaagctgaatcctttatgaggacagatgacattggaactgcatctggatggggattaacccaaaggggttttcttgctagaaatctaatgtatgtcgacataccgattgttgaccatcaaaaatgtactgctgcatatgaaaagccaccctatccaaggggaagtgtaactgctaacatgctttgtgctggcttagaaagtgggggcaaggacagctgcagaggtgacagcggaggggcactggtgtttctagatagtgaaacagagaggtggtttgtgggaggaatagtgtcctggggttccatgaattgtggggaagcaggtcagtatggagtctacacaaaagttattaactatattccctggatcgagaacataattagtgatttttaacttgcgtgtctgcagtcaaggattcttcatttttagaaatgcctgtgaagaccttggcagcgacgtggctcgagaagcattcatcattactgtggacatggcagttgttgctccacccaaaaaaacagactccaggtgaggctgctgtcatttctccacttgccagtttaattccagccttacccattgactcaaggggacataaaccacgagagtgacagtcatctttgcccacccagtgtaatgtcactgctcaaattacatttcattaccttaaaaagccagtctcttttcatactggctgttggcatttctgtaaactgcctgtccatgctctttgtttttaaacttgttcttattgaaaaaaaaaaaaaaaaa

SEQ ID NO: 2828 - RNA, 21 nt, Artificial Sequence
  siRNA sense strand against MASP2
  modified_base (1)..(1): 2'-Deoxy-2'-fluoronucleoside
  modified_base (2)..(2): 2'-O-methylnucleoside
  modified_base (3)..(3): 2'-Deoxy-2'-fluoronucleoside
  modified_base (4)..(4): 2'-O-methylnucleoside
  modified_base (5)..(5): 2'-Deoxy-2'-fluoronucleoside
  modified_base (6)..(6): 2'-O-methylnucleoside
  modified_base (7)..(7): 2'-Deoxy-2'-fluoronucleoside
  modified_base (8)..(8): 2'-O-methylnucleoside
  modified_base (9)..(9): 2'-Deoxy-2'-fluoronucleoside
  modified_base (10)..(10): 2'-O-methylnucleoside
  modified_base (11)..(11): 2'-Deoxy-2'-fluoronucleoside
  modified_base (12)..(12): 2'-Deoxy-2'-fluoronucleoside
  modified_base (13)..(13): 2'-O-methylnucleoside
  modified_base (14)..(14): 2'-Deoxy-2'-fluoronucleoside
  modified_base (15)..(15): 2'-O-methylnucleoside
  modified_base (16)..(16): 2'-Deoxy-2'-fluoronucleoside
  modified_base (17)..(17): 2'-O-methylnucleoside
  modified_base (18)..(18): 2'-Deoxy-2'-fluoronucleoside
  modified_base (19)..(19): 2'-O-methylnucleoside
  modified_base (20)..(20): 2'-Deoxy-2'-fluoronucleoside
  modified_base (21)..(21): 2'-O-methylnucleoside
ugggcccgaaguggccugaac

SEQ ID NO: 2829 - RNA, 21 nt, Artificial Sequence
  siRNA sense strand against MASP2
  modified_base (1)..(1): 2'-Deoxy-2'-fluoronucleoside
  modified_base (2)..(2): 2'-O-methylnucleoside
  modified_base (3)..(3): 2'-Deoxy-2'-fluoronucleoside
  modified_base (4)..(4): 2'-O-methylnucleoside
  modified_base (5)..(5): 2'-Deoxy-2'-fluoronucleoside
  modified_base (6)..(6): 2'-O-methylnucleoside
  modified_base (7)..(7): 2'-Deoxy-2'-fluoronucleoside
  modified_base (8)..(8): 2'-O-methylnucleoside
  modified_base (9)..(9): 2'-Deoxy-2'-fluoronucleoside
  modified_base (10)..(10): 2'-O-methylnucleoside
  modified_base (11)..(11): 2'-Deoxy-2'-fluoronucleoside
  modified_base (12)..(12): 2'-Deoxy-2'-fluoronucleoside
  modified_base (13)..(13): 2'-O-methylnucleoside
  modified_base (14)..(14): 2'-Deoxy-2'-fluoronucleoside
  modified_base (15)..(15): 2'-O-methylnucleoside
  modified_base (16)..(16): 2'-Deoxy-2'-fluoronucleoside
  modified_base (17)..(17): 2'-O-methylnucleoside
  modified_base (18)..(18): 2'-Deoxy-2'-fluoronucleoside
  modified_base (19)..(19): 2'-O-methylnucleoside
  modified_base (20)..(20): 2'-Deoxy-2'-fluoronucleoside
  modified_base (21)..(21): 2'-O-methylnucleoside
cccgaaguggccugaaccugu

SEQ ID NO: 2830 - RNA, 21 nt, Artificial Sequence
  siRNA sense strand against MASP2
  modified_base (1)..(1): 2'-Deoxy-2'-fluoronucleoside
  modified_base (2)..(2): 2'-O-methylnucleoside
  modified_base (3)..(3): 2'-Deoxy-2'-fluoronucleoside
  modified_base (4)..(4): 2'-O-methylnucleoside
  modified_base (5)..(5): 2'-Deoxy-2'-fluoronucleoside
  modified_base (6)..(6): 2'-O-methylnucleoside
  modified_base (7)..(7): 2'-Deoxy-2'-fluoronucleoside
  modified_base (8)..(8): 2'-O-methylnucleoside
  modified_base (9)..(9): 2'-Deoxy-2'-fluoronucleoside
  modified_base (10)..(10): 2'-O-methylnucleoside
  modified_base (11)..(11): 2'-Deoxy-2'-fluoronucleoside
  modified_base (12)..(12): 2'-Deoxy-2'-fluoronucleoside
  modified_base (13)..(13): 2'-O-methylnucleoside
  modified_base (14)..(14): 2'-Deoxy-2'-fluoronucleoside
  modified_base (15)..(15): 2'-O-methylnucleoside
  modified_base (16)..(16): 2'-Deoxy-2'-fluoronucleoside
  modified_base (17)..(17): 2'-O-methylnucleoside
  modified_base (18)..(18): 2'-Deoxy-2'-fluoronucleoside
  modified_base (19)..(19): 2'-O-methylnucleoside
  modified_base (20)..(20): 2'-Deoxy-2'-fluoronucleoside
  modified_base (21)..(21): 2'-O-methylnucleoside
aggagcggcgcuggacccuga

SEQ ID NO: 2831 - RNA, 21 nt, Artificial Sequence
  siRNA sense strand against MASP2
  modified_base (1)..(1): 2'-Deoxy-2'-fluoronucleoside
  modified_base (2)..(2): 2'-O-methylnucleoside
  modified_base (3)..(3): 2'-Deoxy-2'-fluoronucleoside
  modified_base (4)..(4): 2'-O-methylnucleoside
  modified_base (5)..(5): 2'-Deoxy-2'-fluoronucleoside
  modified_base (6)..(6): 2'-O-methylnucleoside
  modified_base (7)..(7): 2'-Deoxy-2'-fluoronucleoside
  modified_base (8)..(8): 2'-O-methylnucleoside
  modified_base (9)..(9): 2'-Deoxy-2'-fluoronucleoside
  modified_base (10)..(10): 2'-O-methylnucleoside
  modified_base (11)..(11): 2'-Deoxy-2'-fluoronucleoside
  modified_base (12)..(12): 2'-Deoxy-2'-fluoronucleoside
  modified_base (13)..(13): 2'-O-methylnucleoside
  modified_base (14)..(14): 2'-Deoxy-2'-fluoronucleoside
  modified_base (15)..(15): 2'-O-methylnucleoside
  modified_base (16)..(16): 2'-Deoxy-2'-fluoronucleoside
  modified_base (17)..(17): 2'-O-methylnucleoside
  modified_base (18)..(18): 2'-Deoxy-2'-fluoronucleoside
  modified_base (19)..(19): 2'-O-methylnucleoside
  modified_base (20)..(20): 2'-Deoxy-2'-fluoronucleoside
  modified_base (21)..(21): 2'-O-methylnucleoside
accgccugcgccucuacuuca

SEQ ID NO: 2832 - RNA, 21 nt, Artificial Sequence
  siRNA sense strand against MASP2
  modified_base (1)..(1): 2'-Deoxy-2'-fluoronucleoside
  modified_base (2)..(2): 2'-O-methylnucleoside
  modified_base (3)..(3): 2'-Deoxy-2'-fluoronucleoside
  modified_base (4)..(4): 2'-O-methylnucleoside
  modified_base (5)..(5): 2'-Deoxy-2'-fluoronucleoside
  modified_base (6)..(6): 2'-O-methylnucleoside
  modified_base (7)..(7): 2'-Deoxy-2'-fluoronucleoside
  modified_base (8)..(8): 2'-O-methylnucleoside
  modified_base (9)..(9): 2'-Deoxy-2'-fluoronucleoside
  modified_base (10)..(10): 2'-O-methylnucleoside
  modified_base (11)..(11): 2'-Deoxy-2'-fluoronucleoside
  modified_base (12)..(12): 2'-Deoxy-2'-fluoronucleoside
  modified_base (13)..(13): 2'-O-methylnucleoside
  modified_base (14)..(14): 2'-Deoxy-2'-fluoronucleoside
  modified_base (15)..(15): 2'-O-methylnucleoside
  modified_base (16)..(16): 2'-Deoxy-2'-fluoronucleoside
  modified_base (17)..(17): 2'-O-methylnucleoside
  modified_base (18)..(18): 2'-Deoxy-2'-fluoronucleoside
  modified_base (19)..(19): 2'-O-methylnucleoside
  modified_base (20)..(20): 2'-Deoxy-2'-fluoronucleoside
  modified_base (21)..(21): 2'-O-methylnucleoside
ccgccugcgccucuacuucac

SEQ ID NO: 2833 - RNA, 21 nt, Artificial Sequence
  siRNA sense strand against MASP2
  modified_base (1)..(1): 2'-Deoxy-2'-fluoronucleoside
  modified_base (2)..(2): 2'-O-methylnucleoside
  modified_base (3)..(3): 2'-Deoxy-2'-fluoronucleoside
  modified_base (4)..(4): 2'-O-methylnucleoside
  modified_base (5)..(5): 2'-Deoxy-2'-fluoronucleoside
  modified_base (6)..(6): 2'-O-methylnucleoside
  modified_base (7)..(7): 2'-Deoxy-2'-fluoronucleoside
  modified_base (8)..(8): 2'-O-methylnucleoside
  modified_base (9)..(9): 2'-Deoxy-2'-fluoronucleoside
  modified_base (10)..(10): 2'-O-methylnucleoside
  modified_base (11)..(11): 2'-Deoxy-2'-fluoronucleoside
  modified_base (12)..(12): 2'-Deoxy-2'-fluoronucleoside
  modified_base (13)..(13): 2'-O-methylnucleoside
  modified_base (14)..(14): 2'-Deoxy-2'-fluoronucleoside
  modified_base (15)..(15): 2'-O-methylnucleoside
  modified_base (16)..(16): 2'-Deoxy-2'-fluoronucleoside
  modified_base (17)..(17): 2'-O-methylnucleoside
  modified_base (18)..(18): 2'-Deoxy-2'-fluoronucleoside
  modified_base (19)..(19): 2'-O-methylnucleoside
  modified_base (20)..(20): 2'-Deoxy-2'-fluoronucleoside
  modified_base (21)..(21): 2'-O-methylnucleoside
cgccugcgccucuacuucacc

SEQ ID NO: 2834 - RNA, 21 nt, Artificial Sequence
  siRNA sense strand against MASP2
  modified_base (1)..(1): 2'-Deoxy-2'-fluoronucleoside
  modified_base (2)..(2): 2'-O-methylnucleoside
  modified_base (3)..(3): 2'-Deoxy-2'-fluoronucleoside
  modified_base (4)..(4): 2'-O-methylnucleoside
  modified_base (5)..(5): 2'-Deoxy-2'-fluoronucleoside
  modified_base (6)..(6): 2'-O-methylnucleoside
  modified_base (7)..(7): 2'-Deoxy-2'-fluoronucleoside
  modified_base (8)..(8): 2'-O-methylnucleoside
  modified_base (9)..(9): 2'-Deoxy-2'-fluoronucleoside
  modified_base (10)..(10): 2'-O-methylnucleoside
  modified_base (11)..(11): 2'-Deoxy-2'-fluoronucleoside
  modified_base (12)..(12): 2'-Deoxy-2'-fluoronucleoside
  modified_base (13)..(13): 2'-O-methylnucleoside
  modified_base (14)..(14): 2'-Deoxy-2'-fluoronucleoside
  modified_base (15)..(15): 2'-O-methylnucleoside
  modified_base (16)..(16): 2'-Deoxy-2'-fluoronucleoside
  modified_base (17)..(17): 2'-O-methylnucleoside
  modified_base (18)..(18): 2'-Deoxy-2'-fluoronucleoside
  modified_base (19)..(19): 2'-O-methylnucleoside
  modified_base (20)..(20): 2'-Deoxy-2'-fluoronucleoside
  modified_base (21)..(21): 2'-O-methylnucleoside
ccucuacuucacccacuucga

SEQ ID NO: 2835 - RNA, 21 nt, Artificial Sequence
  siRNA sense strand against MASP2
  modified_base (1)..(1): 2'-Deoxy-2'-fluoronucleoside
  modified_base (2)..(2): 2'-O-methylnucleoside
  modified_base (3)..(3): 2'-Deoxy-2'-fluoronucleoside
  modified_base (4)..(4): 2'-O-methylnucleoside
  modified_base (5)..(5): 2'-Deoxy-2'-fluoronucleoside
  modified_base (6)..(6): 2'-O-methylnucleoside
  modified_base (7)..(7): 2'-Deoxy-2'-fluoronucleoside
  modified_base (8)..(8): 2'-O-methylnucleoside
  modified_base (9)..(9): 2'-Deoxy-2'-fluoronucleoside
  modified_base (10)..(10): 2'-O-methylnucleoside
  modified_base (11)..(11): 2'-Deoxy-2'-fluoronucleoside
  modified_base (12)..(12): 2'-Deoxy-2'-fluoronucleoside
  modified_base (13)..(13): 2'-O-methylnucleoside
  modified_base (14)..(14): 2'-Deoxy-2'-fluoronucleoside
  modified_base (15)..(15): 2'-O-methylnucleoside
  modified_base (16)..(16): 2'-Deoxy-2'-fluoronucleoside
  modified_base (17)..(17): 2'-O-methylnucleoside
  modified_base (18)..(18): 2'-Deoxy-2'-fluoronucleoside
  modified_base (19)..(19): 2'-O-methylnucleoside
  modified_base (20)..(20): 2'-Deoxy-2'-fluoronucleoside
  modified_base (21)..(21): 2'-O-methylnucleoside
cucuacuucacccacuucgac

SEQ ID NO: 2836 - RNA, 21 nt, Artificial Sequence
  siRNA sense strand against MASP2
  modified_base (1)..(1): 2'-Deoxy-2'-fluoronucleoside
  modified_base (2)..(2): 2'-O-methylnucleoside
  modified_base (3)..(3): 2'-Deoxy-2'-fluoronucleoside
  modified_base (4)..(4): 2'-O-methylnucleoside
  modified_base (5)..(5): 2'-Deoxy-2'-fluoronucleoside
  modified_base (6)..(6): 2'-O-methylnucleoside
  modified_base (7)..(7): 2'-Deoxy-2'-fluoronucleoside
  modified_base (8)..(8): 2'-O-methylnucleoside
  modified_base (9)..(9): 2'-Deoxy-2'-fluoronucleoside
  modified_base (10)..(10): 2'-O-methylnucleoside
  modified_base (11)..(11): 2'-Deoxy-2'-fluoronucleoside
  modified_base (12)..(12): 2'-Deoxy-2'-fluoronucleoside
  modified_base (13)..(13): 2'-O-methylnucleoside
  modified_base (14)..(14): 2'-Deoxy-2'-fluoronucleoside
  modified_base (15)..(15): 2'-O-methylnucleoside
  modified_base (16)..(16): 2'-Deoxy-2'-fluoronucleoside
  modified_base (17)..(17): 2'-O-methylnucleoside
  modified_base (18)..(18): 2'-Deoxy-2'-fluoronucleoside
  modified_base (19)..(19): 2'-O-methylnucleoside
  modified_base (20)..(20): 2'-Deoxy-2'-fluoronucleoside
  modified_base (21)..(21): 2'-O-methylnucleoside
cugcgaguacgacuucgucaa

SEQ ID NO: 2837 - RNA, 21 nt, Artificial Sequence
  siRNA sense strand against MASP2
  modified_base (1)..(1): 2'-Deoxy-2'-fluoronucleoside
  modified_base (2)..(2): 2'-O-methylnucleoside
  modified_base (3)..(3): 2'-Deoxy-2'-fluoronucleoside
  modified_base (4)..(4): 2'-O-methylnucleoside
  modified_base (5)..(5): 2'-Deoxy-2'-fluoronucleoside
  modified_base (6)..(6): 2'-O-methylnucleoside
  modified_base (7)..(7): 2'-Deoxy-2'-fluoronucleoside
  modified_base (8)..(8): 2'-O-methylnucleoside
  modified_base (9)..(9): 2'-Deoxy-2'-fluoronucleoside
  modified_base (10)..(10): 2'-O-methylnucleoside
  modified_base (11)..(11): 2'-Deoxy-2'-fluoronucleoside
  modified_base (12)..(12): 2'-Deoxy-2'-fluoronucleoside
  modified_base (13)..(13): 2'-O-methylnucleoside
  modified_base (14)..(14): 2'-Deoxy-2'-fluoronucleoside
  modified_base (15)..(15): 2'-O-methylnucleoside
  modified_base (16)..(16): 2'-Deoxy-2'-fluoronucleoside
  modified_base (17)..(17): 2'-O-methylnucleoside
  modified_base (18)..(18): 2'-Deoxy-2'-fluoronucleoside
  modified_base (19)..(19): 2'-O-methylnucleoside
  modified_base (20)..(20): 2'-Deoxy-2'-fluoronucleoside
  modified_base (21)..(21): 2'-O-methylnucleoside
acacuuucuacucgcugggcu

SEQ ID NO: 2838 - RNA, 21 nt, Artificial Sequence
  siRNA sense strand against MASP2
  modified_base (1)..(1): 2'-Deoxy-2'-fluoronucleoside
  modified_base (2)..(2): 2'-O-methylnucleoside
  modified_base (3)..(3): 2'-Deoxy-2'-fluoronucleoside
  modified_base (4)..(4): 2'-O-methylnucleoside
  modified_base (5)..(5): 2'-Deoxy-2'-fluoronucleoside
  modified_base (6)..(6): 2'-O-methylnucleoside
  modified_base (7)..(7): 2'-Deoxy-2'-fluoronucleoside
  modified_base (8)..(8): 2'-O-methylnucleoside
  modified_base (9)..(9): 2'-Deoxy-2'-fluoronucleoside
  modified_base (10)..(10): 2'-O-methylnucleoside
  modified_base (11)..(11): 2'-Deoxy-2'-fluoronucleoside
  modified_base (12)..(12): 2'-Deoxy-2'-fluoronucleoside
  modified_base (13)..(13): 2'-O-methylnucleoside
  modified_base (14)..(14): 2'-Deoxy-2'-fluoronucleoside
  modified_base (15)..(15): 2'-O-methylnucleoside
  modified_base (16)..(16): 2'-Deoxy-2'-fluoronucleoside
  modified_base (17)..(17): 2'-O-methylnucleoside
  modified_base (18)..(18): 2'-Deoxy-2'-fluoronucleoside
  modified_base (19)..(19): 2'-O-methylnucleoside
  modified_base (20)..(20): 2'-Deoxy-2'-fluoronucleoside
  modified_base (21)..(21): 2'-O-methylnucleoside
gggcuccagccuggacauuac

SEQ ID NO: 2839 - RNA, 21 nt, Artificial Sequence
  siRNA sense strand against MASP2
  modified_base (1)..(1): 2'-Deoxy-2'-fluoronucleoside
  modified_base (2)..(2): 2'-O-methylnucleoside
  modified_base (3)..(3): 2'-Deoxy-2'-fluoronucleoside
  modified_base (4)..(4): 2'-O-methylnucleoside
  modified_base (5)..(5): 2'-Deoxy-2'-fluoronucleoside
  modified_base (6)..(6): 2'-O-methylnucleoside
  modified_base (7)..(7): 2'-Deoxy-2'-fluoronucleoside
  modified_base (8)..(8): 2'-O-methylnucleoside
  modified_base (9)..(9): 2'-Deoxy-2'-fluoronucleoside
  modified_base (10)..(10): 2'-O-methylnucleoside
  modified_base (11)..(11): 2'-Deoxy-2'-fluoronucleoside
  modified_base (12)..(12): 2'-Deoxy-2'-fluoronucleoside
  modified_base (13)..(13): 2'-O-methylnucleoside
  modified_base (14)..(14): 2'-Deoxy-2'-fluoronucleoside
  modified_base (15)..(15): 2'-O-methylnucleoside
  modified_base (16)..(16): 2'-Deoxy-2'-fluoronucleoside
  modified_base (17)..(17): 2'-O-methylnucleoside
  modified_base (18)..(18): 2'-Deoxy-2'-fluoronucleoside
  modified_base (19)..(19): 2'-O-methylnucleoside
  modified_base (20)..(20): 2'-Deoxy-2'-fluoronucleoside
  modified_base (21)..(21): 2'-O-methylnucleoside
gccuggacauuaccuuccgcu

SEQ ID NO: 2840 - RNA, 21 nt, Artificial Sequence
  siRNA sense strand against MASP2
  modified_base (1)..(1): 2'-Deoxy-2'-fluoronucleoside
  modified_base (2)..(2): 2'-O-methylnucleoside
  modified_base (3)..(3): 2'-Deoxy-2'-fluoronucleoside
  modified_base (4)..(4): 2'-O-methylnucleoside
  modified_base (5)..(5): 2'-Deoxy-2'-fluoronucleoside
  modified_base (6)..(6): 2'-O-methylnucleoside
  modified_base (7)..(7): 2'-Deoxy-2'-fluoronucleoside
  modified_base (8)..(8): 2'-O-methylnucleoside
  modified_base (9)..(9): 2'-Deoxy-2'-fluoronucleoside
  modified_base (10)..(10): 2'-O-methylnucleoside
  modified_base (11)..(11): 2'-Deoxy-2'-fluoronucleoside
  modified_base (12)..(12): 2'-Deoxy-2'-fluoronucleoside
  modified_base (13)..(13): 2'-O-methylnucleoside
  modified_base (14)..(14): 2'-Deoxy-2'-fluoronucleoside
  modified_base (15)..(15): 2'-O-methylnucleoside
  modified_base (16)..(16): 2'-Deoxy-2'-fluoronucleoside
  modified_base (17)..(17): 2'-O-methylnucleoside
  modified_base (18)..(18): 2'-Deoxy-2'-fluoronucleoside
  modified_base (19)..(19): 2'-O-methylnucleoside
  modified_base (20)..(20): 2'-Deoxy-2'-fluoronucleoside
  modified_base (21)..(21): 2'-O-methylnucleoside
ggguucgaggccuucuaugca

SEQ ID NO: 2841 - RNA, 21 nt, Artificial Sequence
  siRNA sense strand against MASP2
  modified_base (1)..(1): 2'-Deoxy-2'-fluoronucleoside
  modified_base (2)..(2): 2'-O-methylnucleoside
  modified_base (3)..(3): 2'-Deoxy-2'-fluoronucleoside
  modified_base (4)..(4): 2'-O-methylnucleoside
  modified_base (5)..(5): 2'-Deoxy-2'-fluoronucleoside
  modified_base (6)..(6): 2'-O-methylnucleoside
  modified_base (7)..(7): 2'-Deoxy-2'-fluoronucleoside
  modified_base (8)..(8): 2'-O-methylnucleoside
  modified_base (9)..(9): 2'-Deoxy-2'-fluoronucleoside
  modified_base (10)..(10): 2'-O-methylnucleoside
  modified_base (11)..(11): 2'-Deoxy-2'-fluoronucleoside
  modified_base (12)..(12): 2'-Deoxy-2'-fluoronucleoside
  modified_base (13)..(13): 2'-O-methylnucleoside
  modified_base (14)..(14): 2'-Deoxy-2'-fluoronucleoside
  modified_base (15)..(15): 2'-O-methylnucleoside
  modified_base (16)..(16): 2'-Deoxy-2'-fluoronucleoside
  modified_base (17)..(17): 2'-O-methylnucleoside
  modified_base (18)..(18): 2'-Deoxy-2'-fluoronucleoside
  modified_base (19)..(19): 2'-O-methylnucleoside
  modified_base (20)..(20): 2'-Deoxy-2'-fluoronucleoside
  modified_base (21)..(21): 2'-O-methylnucleoside
gcagccgaggacauugacgag

SEQ ID NO: 2842 - RNA, 21 nt, Artificial Sequence
  siRNA sense strand against MASP2
  modified_base (1)..(1): 2'-Deoxy-2'-fluoronucleoside
  modified_base (2)..(2): 2'-O-methylnucleoside
  modified_base (3)..(3): 2'-Deoxy-2'-fluoronucleoside
  modified_base (4)..(4): 2'-O-methylnucleoside
  modified_base (5)..(5): 2'-Deoxy-2'-fluoronucleoside
  modified_base (6)..(6): 2'-O-methylnucleoside
  modified_base (7)..(7): 2'-Deoxy-2'-fluoronucleoside
  modified_base (8)..(8): 2'-O-methylnucleoside
  modified_base (9)..(9): 2'-Deoxy-2'-fluoronucleoside
  modified_base (10)..(10): 2'-O-methylnucleoside
  modified_base (11)..(11): 2'-Deoxy-2'-fluoronucleoside
  modified_base (12)..(12): 2'-Deoxy-2'-fluoronucleoside
  modified_base (13)..(13): 2'-O-methylnucleoside
  modified_base (14)..(14): 2'-Deoxy-2'-fluoronucleoside
  modified_base (15)..(15): 2'-O-methylnucleoside
  modified_base (16)..(16): 2'-Deoxy-2'-fluoronucleoside
  modified_base (17)..(17): 2'-O-methylnucleoside
  modified_base (18)..(18): 2'-Deoxy-2'-fluoronucleoside
  modified_base (19)..(19): 2'-O-methylnucleoside
  modified_base (20)..(20): 2'-Deoxy-2'-fluoronucleoside
  modified_base (21)..(21): 2'-O-methylnucleoside
ccugugucccuacgacuuucu

SEQ ID NO: 2843 - RNA, 21 nt, Artificial Sequence
  siRNA sense strand against MASP2
  modified_base (1)..(1): 2'-Deoxy-2'-fluoronucleoside
  modified_base (2)..(2): 2'-O-methylnucleoside
  modified_base (3)..(3): 2'-Deoxy-2'-fluoronucleoside
  modified_base (4)..(4): 2'-O-methylnucleoside
  modified_base (5)..(5): 2'-Deoxy-2'-fluoronucleoside
  modified_base (6)..(6): 2'-O-methylnucleoside
  modified_base (7)..(7): 2'-Deoxy-2'-fluoronucleoside
  modified_base (8)..(8): 2'-O-methylnucleoside
  modified_base (9)..(9): 2'-Deoxy-2'-fluoronucleoside
  modified_base (10)..(10): 2'-O-methylnucleoside
  modified_base (11)..(11): 2'-Deoxy-2'-fluoronucleoside
  modified_base (12)..(12): 2'-Deoxy-2'-fluoronucleoside
  modified_base (13)..(13): 2'-O-methylnucleoside
  modified_base (14)..(14): 2'-Deoxy-2'-fluoronucleoside
  modified_base (15)..(15): 2'-O-methylnucleoside
  modified_base (16)..(16): 2'-Deoxy-2'-fluoronucleoside
  modified_base (17)..(17): 2'-O-methylnucleoside
  modified_base (18)..(18): 2'-Deoxy-2'-fluoronucleoside
  modified_base (19)..(19): 2'-O-methylnucleoside
  modified_base (20)..(20): 2'-Deoxy-2'-fluoronucleoside
  modified_base (21)..(21): 2'-O-methylnucleoside
cuacgacuuucucaagauuca

SEQ ID NO: 2844 - RNA, 21 nt, Artificial Sequence
  siRNA sense strand against MASP2
  modified_base (1)..(1): 2'-Deoxy-2'-fluoronucleoside
  modified_base (2)..(2): 2'-O-methylnucleoside
  modified_base (3)..(3): 2'-Deoxy-2'-fluoronucleoside
  modified_base (4)..(4): 2'-O-methylnucleoside
  modified_base (5)..(5): 2'-Deoxy-2'-fluoronucleoside
  modified_base (6)..(6): 2'-O-methylnucleoside
  modified_base (7)..(7): 2'-Deoxy-2'-fluoronucleoside
  modified_base (8)..(8): 2'-O-methylnucleoside
  modified_base (9)..(9): 2'-Deoxy-2'-fluoronucleoside
  modified_base (10)..(10): 2'-O-methylnucleoside
  modified_base (11)..(11): 2'-Deoxy-2'-fluoronucleoside
  modified_base (12)..(12): 2'-Deoxy-2'-fluoronucleoside
  modified_base (13)..(13): 2'-O-methylnucleoside
  modified_base (14)..(14): 2'-Deoxy-2'-fluoronucleoside
  modified_base (15)..(15): 2'-O-methylnucleoside
  modified_base (16)..(16): 2'-Deoxy-2'-fluoronucleoside
  modified_base (17)..(17): 2'-O-methylnucleoside
  modified_base (18)..(18): 2'-Deoxy-2'-fluoronucleoside
  modified_base (19)..(19): 2'-O-methylnucleoside
  modified_base (20)..(20): 2'-Deoxy-2'-fluoronucleoside
  modified_base (21)..(21): 2'-O-methylnucleoside
uucucaagauucaaacagaca

SEQ ID NO: 2845 - RNA, 21 nt, Artificial Sequence
  siRNA sense strand against MASP2
  modified_base (1)..(1): 2'-Deoxy-2'-fluoronucleoside
  modified_base (2)..(2): 2'-O-methylnucleoside
  modified_base (3)..(3): 2'-Deoxy-2'-fluoronucleoside
  modified_base (4)..(4): 2'-O-methylnucleoside
  modified_base (5)..(5): 2'-Deoxy-2'-fluoronucleoside
  modified_base (6)..(6): 2'-O-methylnucleoside
  modified_base (7)..(7): 2'-Deoxy-2'-fluoronucleoside
  modified_base (8)..(8): 2'-O-methylnucleoside
  modified_base (9)..(9): 2'-Deoxy-2'-fluoronucleoside
  modified_base (10)..(10): 2'-O-methylnucleoside
  modified_base (11)..(11): 2'-Deoxy-2'-fluoronucleoside
  modified_base (12)..(12): 2'-Deoxy-2'-fluoronucleoside
  modified_base (13)..(13): 2'-O-methylnucleoside
  modified_base (14)..(14): 2'-Deoxy-2'-fluoronucleoside
  modified_base (15)..(15): 2'-O-methylnucleoside
  modified_base (16)..(16): 2'-Deoxy-2'-fluoronucleoside
  modified_base (17)..(17): 2'-O-methylnucleoside
  modified_base (18)..(18): 2'-Deoxy-2'-fluoronucleoside
  modified_base (19)..(19): 2'-O-methylnucleoside
  modified_base (20)..(20): 2'-Deoxy-2'-fluoronucleoside
  modified_base (21)..(21): 2'-O-methylnucleoside
ucucaagauucaaacagacag

SEQ ID NO: 2846 - RNA, 21 nt, Artificial Sequence
  siRNA sense strand against MASP2
  modified_base (1)..(1): 2'-Deoxy-2'-fluoronucleoside
  modified_base (2)..(2): 2'-O-methylnucleoside
  modified_base (3)..(3): 2'-Deoxy-2'-fluoronucleoside
  modified_base (4)..(4): 2'-O-methylnucleoside
  modified_base (5)..(5): 2'-Deoxy-2'-fluoronucleoside
  modified_base (6)..(6): 2'-O-methylnucleoside
  modified_base (7)..(7): 2'-Deoxy-2'-fluoronucleoside
  modified_base (8)..(8): 2'-O-methylnucleoside
  modified_base (9)..(9): 2'-Deoxy-2'-fluoronucleoside
  modified_base (10)..(10): 2'-O-methylnucleoside
  modified_base (11)..(11): 2'-Deoxy-2'-fluoronucleoside
  modified_base (12)..(12): 2'-Deoxy-2'-fluoronucleoside
  modified_base (13)..(13): 2'-O-methylnucleoside
  modified_base (14)..(14): 2'-Deoxy-2'-fluoronucleoside
  modified_base (15)..(15): 2'-O-methylnucleoside
  modified_base (16)..(16): 2'-Deoxy-2'-fluoronucleoside
  modified_base (17)..(17): 2'-O-methylnucleoside
  modified_base (18)..(18): 2'-Deoxy-2'-fluoronucleoside
  modified_base (19)..(19): 2'-O-methylnucleoside
  modified_base (20)..(20): 2'-Deoxy-2'-fluoronucleoside
  modified_base (21)..(21): 2'-O-methylnucleoside
ucacagaugaaucaggagacc

SEQ ID NO: 2847 - RNA, 21 nt, Artificial Sequence
  siRNA sense strand against MASP2
  modified_base (1)..(1): 2'-Deoxy-2'-fluoronucleoside
  modified_base (2)..(2): 2'-O-methylnucleoside
  modified_base (3)..(3): 2'-Deoxy-2'-fluoronucleoside
  modified_base (4)..(4): 2'-O-methylnucleoside
  modified_base (5)..(5): 2'-Deoxy-2'-fluoronucleoside
  modified_base (6)..(6): 2'-O-methylnucleoside
  modified_base (7)..(7): 2'-Deoxy-2'-fluoronucleoside
  modified_base (8)..(8): 2'-O-methylnucleoside
  modified_base (9)..(9): 2'-Deoxy-2'-fluoronucleoside
  modified_base (10)..(10): 2'-O-methylnucleoside
  modified_base (11)..(11): 2'-Deoxy-2'-fluoronucleoside
  modified_base (12)..(12): 2'-Deoxy-2'-fluoronucleoside
  modified_base (13)..(13): 2'-O-methylnucleoside
  modified_base (14)..(14): 2'-Deoxy-2'-fluoronucleoside
  modified_base (15)..(15): 2'-O-methylnucleoside
  modified_base (16)..(16): 2'-Deoxy-2'-fluoronucleoside
  modified_base (17)..(17): 2'-O-methylnucleoside
  modified_base (18)..(18): 2'-Deoxy-2'-fluoronucleoside
  modified_base (19)..(19): 2'-O-methylnucleoside
  modified_base (20)..(20): 2'-Deoxy-2'-fluoronucleoside
  modified_base (21)..(21): 2'-O-methylnucleoside
ccaaauacauccugaaagaca

SEQ ID NO: 2848 - RNA, 21 nt, Artificial Sequence
  siRNA sense strand against MASP2
  modified_base (1)..(1): 2'-Deoxy-2'-fluoronucleoside
  modified_base (2)..(2): 2'-O-methylnucleoside
  modified_base (3)..(3): 2'-Deoxy-2'-fluoronucleoside
  modified_base (4)..(4): 2'-O-methylnucleoside
  modified_base (5)..(5): 2'-Deoxy-2'-fluoronucleoside
  modified_base (6)..(6): 2'-O-methylnucleoside
  modified_base (7)..(7): 2'-Deoxy-2'-fluoronucleoside
  modified_base (8)..(8): 2'-O-methylnucleoside
  modified_base (9)..(9): 2'-Deoxy-2'-fluoronucleoside
  modified_base (10)..(10): 2'-O-methylnucleoside
  modified_base (11)..(11): 2'-Deoxy-2'-fluoronucleoside
  modified_base (12)..(12): 2'-Deoxy-2'-fluoronucleoside
  modified_base (13)..(13): 2'-O-methylnucleoside
  modified_base (14)..(14): 2'-Deoxy-2'-fluoronucleoside
  modified_base (15)..(15): 2'-O-methylnucleoside
  modified_base (16)..(16): 2'-Deoxy-2'-fluoronucleoside
  modified_base (17)..(17): 2'-O-methylnucleoside
  modified_base (18)..(18): 2'-Deoxy-2'-fluoronucleoside
  modified_base (19)..(19): 2'-O-methylnucleoside
  modified_base (20)..(20): 2'-Deoxy-2'-fluoronucleoside
  modified_base (21)..(21): 2'-O-methylnucleoside
ccugaaagacagcuucuccau

SEQ ID NO: 2849 - RNA, 21 nt, Artificial Sequence
  siRNA sense strand against MASP2
  modified_base (1)..(1): 2'-Deoxy-2'-fluoronucleoside
  modified_base (2)..(2): 2'-O-methylnucleoside
  modified_base (3)..(3): 2'-Deoxy-2'-fluoronucleoside
  modified_base (4)..(4): 2'-O-methylnucleoside
  modified_base (5)..(5): 2'-Deoxy-2'-fluoronucleoside
  modified_base (6)..(6): 2'-O-methylnucleoside
  modified_base (7)..(7): 2'-Deoxy-2'-fluoronucleoside
  modified_base (8)..(8): 2'-O-methylnucleoside
  modified_base (9)..(9): 2'-Deoxy-2'-fluoronucleoside
  modified_base (10)..(10): 2'-O-methylnucleoside
  modified_base (11)..(11): 2'-Deoxy-2'-fluoronucleoside
  modified_base (12)..(12): 2'-Deoxy-2'-fluoronucleoside
  modified_base (13)..(13): 2'-O-methylnucleoside
  modified_base (14)..(14): 2'-Deoxy-2'-fluoronucleoside
  modified_base (15)..(15): 2'-O-methylnucleoside
  modified_base (16)..(16): 2'-Deoxy-2'-fluoronucleoside
  modified_base (17)..(17): 2'-O-methylnucleoside
  modified_base (18)..(18): 2'-Deoxy-2'-fluoronucleoside
  modified_base (19)..(19): 2'-O-methylnucleoside
  modified_base (20)..(20): 2'-Deoxy-2'-fluoronucleoside
  modified_base (21)..(21): 2'-O-methylnucleoside
gacuggcuaugagcuucugca

SEQ ID NO: 2850 - RNA, 21 nt, Artificial Sequence
  siRNA sense strand against MASP2
  modified_base (1)..(1): 2'-Deoxy-2'-fluoronucleoside
  modified_base (2)..(2): 2'-O-methylnucleoside
  modified_base (3)..(3): 2'-Deoxy-2'-fluoronucleoside
  modified_base (4)..(4): 2'-O-methylnucleoside
  modified_base (5)..(5): 2'-Deoxy-2'-fluoronucleoside
  modified_base (6)..(6): 2'-O-methylnucleoside
  modified_base (7)..(7): 2'-Deoxy-2'-fluoronucleoside
  modified_base (8)..(8): 2'-O-methylnucleoside
  modified_base (9)..(9): 2'-Deoxy-2'-fluoronucleoside
  modified_base (10)..(10): 2'-O-methylnucleoside
  modified_base (11)..(11): 2'-Deoxy-2'-fluoronucleoside
  modified_base (12)..(12): 2'-Deoxy-2'-fluoronucleoside
  modified_base (13)..(13): 2'-O-methylnucleoside
  modified_base (14)..(14): 2'-Deoxy-2'-fluoronucleoside
  modified_base (15)..(15): 2'-O-methylnucleoside
  modified_base (16)..(16): 2'-Deoxy-2'-fluoronucleoside
  modified_base (17)..(17): 2'-O-methylnucleoside
  modified_base (18)..(18): 2'-Deoxy-2'-fluoronucleoside
  modified_base (19)..(19): 2'-O-methylnucleoside
  modified_base (20)..(20): 2'-Deoxy-2'-fluoronucleoside
  modified_base (21)..(21): 2'-O-methylnucleoside
cuacaaagcugugauucagua

SEQ ID NO: 2851 - RNA, 21 nt, Artificial Sequence
  siRNA sense strand against MASP2
  modified_base (1)..(1): 2'-Deoxy-2'-fluoronucleoside
  modified_base (2)..(2): 2'-O-methylnucleoside
  modified_base (3)..(3): 2'-Deoxy-2'-fluoronucleoside
  modified_base (4)..(4): 2'-O-methylnucleoside
  modified_base (5)..(5): 2'-Deoxy-2'-fluoronucleoside
  modified_base (6)..(6): 2'-O-methylnucleoside
  modified_base (7)..(7): 2'-Deoxy-2'-fluoronucleoside
  modified_base (8)..(8): 2'-O-methylnucleoside
  modified_base (9)..(9): 2'-Deoxy-2'-fluoronucleoside
  modified_base (10)..(10): 2'-O-methylnucleoside
  modified_base (11)..(11): 2'-Deoxy-2'-fluoronucleoside
  modified_base (12)..(12): 2'-Deoxy-2'-fluoronucleoside
  modified_base (13)..(13): 2'-O-methylnucleoside
  modified_base (14)..(14): 2'-Deoxy-2'-fluoronucleoside
  modified_base (15)..(15): 2'-O-methylnucleoside
  modified_base (16)..(16): 2'-Deoxy-2'-fluoronucleoside
  modified_base (17)..(17): 2'-O-methylnucleoside
  modified_base (18)..(18): 2'-Deoxy-2'-fluoronucleoside
  modified_base (19)..(19): 2'-O-methylnucleoside
  modified_base (20)..(20): 2'-Deoxy-2'-fluoronucleoside
  modified_base (21)..(21): 2'-O-methylnucleoside
uacaaagcugugauucaguac

SEQ ID NO: 2852 - RNA, 21 nt, Artificial Sequence
  siRNA sense strand against MASP2
  modified_base (1)..(1): 2'-Deoxy-2'-fluoronucleoside
  modified_base (2)..(2): 2'-O-methylnucleoside
  modified_base (3)..(3): 2'-Deoxy-2'-fluoronucleoside
  modified_base (4)..(4): 2'-O-methylnucleoside
  modified_base (5)..(5): 2'-Deoxy-2'-fluoronucleoside
  modified_base (6)..(6): 2'-O-methylnucleoside
  modified_base (7)..(7): 2'-Deoxy-2'-fluoronucleoside
  modified_base (8)..(8): 2'-O-methylnucleoside
  modified_base (9)..(9): 2'-Deoxy-2'-fluoronucleoside
  modified_base (10)..(10): 2'-O-methylnucleoside
  modified_base (11)..(11): 2'-Deoxy-2'-fluoronucleoside
  modified_base (12)..(12): 2'-Deoxy-2'-fluoronucleoside
  modified_base (13)..(13): 2'-O-methylnucleoside
  modified_base (14)..(14): 2'-Deoxy-2'-fluoronucleoside
  modified_base (15)..(15): 2'-O-methylnucleoside
  modified_base (16)..(16): 2'-Deoxy-2'-fluoronucleoside
  modified_base (17)..(17): 2'-O-methylnucleoside
  modified_base (18)..(18): 2'-Deoxy-2'-fluoronucleoside
  modified_base (19)..(19): 2'-O-methylnucleoside
  modified_base (20)..(20): 2'-Deoxy-2'-fluoronucleoside
  modified_base (21)..(21): 2'-O-methylnucleoside
acaaagcugugauucaguaca

SEQ ID NO: 2853 - RNA, 21 nt, Artificial Sequence
  siRNA sense strand against MASP2
  modified_base (1)..(1): 2'-Deoxy-2'-fluoronucleoside
  modified_base (2)..(2): 2'-O-methylnucleoside
  modified_base (3)..(3): 2'-Deoxy-2'-fluoronucleoside
  modified_base (4)..(4): 2'-O-methylnucleoside
  modified_base (5)..(5): 2'-Deoxy-2'-fluoronucleoside
  modified_base (6)..(6): 2'-O-methylnucleoside
  modified_base (7)..(7): 2'-Deoxy-2'-fluoronucleoside
  modified_base (8)..(8): 2'-O-methylnucleoside
  modified_base (9)..(9): 2'-Deoxy-2'-fluoronucleoside
  modified_base (10)..(10): 2'-O-methylnucleoside
  modified_base (11)..(11): 2'-Deoxy-2'-fluoronucleoside
  modified_base (12)..(12): 2'-Deoxy-2'-fluoronucleoside
  modified_base (13)..(13): 2'-O-methylnucleoside
  modified_base (14)..(14): 2'-Deoxy-2'-fluoronucleoside
  modified_base (15)..(15): 2'-O-methylnucleoside
  modified_base (16)..(16): 2'-Deoxy-2'-fluoronucleoside
  modified_base (17)..(17): 2'-O-methylnucleoside
  modified_base (18)..(18): 2'-Deoxy-2'-fluoronucleoside
  modified_base (19)..(19): 2'-O-methylnucleoside
  modified_base (20)..(20): 2'-Deoxy-2'-fluoronucleoside
  modified_base (21)..(21): 2'-O-methylnucleoside
gugauucaguacagcugugaa

SEQ ID NO: 2854 - RNA, 21 nt, Artificial Sequence
  siRNA sense strand against MASP2
  modified_base (1)..(1): 2'-Deoxy-2'-fluoronucleoside
  modified_base (2)..(2): 2'-O-methylnucleoside
  modified_base (3)..(3): 2'-Deoxy-2'-fluoronucleoside
  modified_base (4)..(4): 2'-O-methylnucleoside
  modified_base (5)..(5): 2'-Deoxy-2'-fluoronucleoside
  modified_base (6)..(6): 2'-O-methylnucleoside
  modified_base (7)..(7): 2'-Deoxy-2'-fluoronucleoside
  modified_base (8)..(8): 2'-O-methylnucleoside
  modified_base (9)..(9): 2'-Deoxy-2'-fluoronucleoside
  modified_base (10)..(10): 2'-O-methylnucleoside
  modified_base (11)..(11): 2'-Deoxy-2'-fluoronucleoside
  modified_base (12)..(12): 2'-Deoxy-2'-fluoronucleoside
  modified_base (13)..(13): 2'-O-methylnucleoside
  modified_base (14)..(14): 2'-Deoxy-2'-fluoronucleoside
  modified_base (15)..(15): 2'-O-methylnucleoside
  modified_base (16)..(16): 2'-Deoxy-2'-fluoronucleoside
  modified_base (17)..(17): 2'-O-methylnucleoside
  modified_base (18)..(18): 2'-Deoxy-2'-fluoronucleoside
  modified_base (19)..(19): 2'-O-methylnucleoside
  modified_base (20)..(20): 2'-Deoxy-2'-fluoronucleoside
  modified_base (21)..(21): 2'-O-methylnucleoside
uucaguacagcugugaagaga

SEQ ID NO: 2855 - RNA, 21 nt, Artificial Sequence
  siRNA sense strand against MASP2
  modified_base (1)..(1): 2'-Deoxy-2'-fluoronucleoside
  modified_base (2)..(2): 2'-O-methylnucleoside
  modified_base (3)..(3): 2'-Deoxy-2'-fluoronucleoside
  modified_base (4)..(4): 2'-O-methylnucleoside
  modified_base (5)..(5): 2'-Deoxy-2'-fluoronucleoside
  modified_base (6)..(6): 2'-O-methylnucleoside
  modified_base (7)..(7): 2'-Deoxy-2'-fluoronucleoside
  modified_base (8)..(8): 2'-O-methylnucleoside
  modified_base (9)..(9): 2'-Deoxy-2'-fluoronucleoside
  modified_base (10)..(10): 2'-O-methylnucleoside
  modified_base (11)..(11): 2'-Deoxy-2'-fluoronucleoside
  modified_base (12)..(12): 2'-Deoxy-2'-fluoronucleoside
  modified_base (13)..(13): 2'-O-methylnucleoside
  modified_base (14)..(14): 2'-Deoxy-2'-fluoronucleoside
  modified_base (15)..(15): 2'-O-methylnucleoside
  modified_base (16)..(16): 2'-Deoxy-2'-fluoronucleoside
  modified_base (17)..(17): 2'-O-methylnucleoside
  modified_base (18)..(18): 2'-Deoxy-2'-fluoronucleoside
  modified_base (19)..(19): 2'-O-methylnucleoside
  modified_base (20)..(20): 2'-Deoxy-2'-fluoronucleoside
  modified_base (21)..(21): 2'-O-methylnucleoside
caguacagcugugaagagacc

SEQ ID NO: 2856 - RNA, 21 nt, Artificial Sequence
  siRNA sense strand against MASP2
  modified_base (1)..(1): 2'-Deoxy-2'-fluoronucleoside
  modified_base (2)..(2): 2'-O-methylnucleoside
  modified_base (3)..(3): 2'-Deoxy-2'-fluoronucleoside
  modified_base (4)..(4): 2'-O-methylnucleoside
  modified_base (5)..(5): 2'-Deoxy-2'-fluoronucleoside
  modified_base (6)..(6): 2'-O-methylnucleoside
  modified_base (7)..(7): 2'-Deoxy-2'-fluoronucleoside
  modified_base (8)..(8): 2'-O-methylnucleoside
  modified_base (9)..(9): 2'-Deoxy-2'-fluoronucleoside
  modified_base (10)..(10): 2'-O-methylnucleoside
  modified_base (11)..(11): 2'-Deoxy-2'-fluoronucleoside
  modified_base (12)..(12): 2'-Deoxy-2'-fluoronucleoside
  modified_base (13)..(13): 2'-O-methylnucleoside
  modified_base (14)..(14): 2'-Deoxy-2'-fluoronucleoside
  modified_base (15)..(15): 2'-O-methylnucleoside
  modified_base (16)..(16): 2'-Deoxy-2'-fluoronucleoside
  modified_base (17)..(17): 2'-O-methylnucleoside
  modified_base (18)..(18): 2'-Deoxy-2'-fluoronucleoside
  modified_base (19)..(19): 2'-O-methylnucleoside
  modified_base (20)..(20): 2'-Deoxy-2'-fluoronucleoside
  modified_base (21)..(21): 2'-O-methylnucleoside
uacagcugugaagagaccuuc

SEQ ID NO: 2857 - RNA, 21 nt, Artificial Sequence
  siRNA sense strand against MASP2
  modified_base (1)..(1): 2'-Deoxy-2'-fluoronucleoside
  modified_base (2)..(2): 2'-O-methylnucleoside
  modified_base (3)..(3): 2'-Deoxy-2'-fluoronucleoside
  modified_base (4)..(4): 2'-O-methylnucleoside
  modified_base (5)..(5): 2'-Deoxy-2'-fluoronucleoside
  modified_base (6)..(6): 2'-O-methylnucleoside
  modified_base (7)..(7): 2'-Deoxy-2'-fluoronucleoside
  modified_base (8)..(8): 2'-O-methylnucleoside
  modified_base (9)..(9): 2'-Deoxy-2'-fluoronucleoside
  modified_base (10)..(10): 2'-O-methylnucleoside
  modified_base (11)..(11): 2'-Deoxy-2'-fluoronucleoside
  modified_base (12)..(12): 2'-Deoxy-2'-fluoronucleoside
  modified_base (13)..(13): 2'-O-methylnucleoside
  modified_base (14)..(14): 2'-Deoxy-2'-fluoronucleoside
  modified_base (15)..(15): 2'-O-methylnucleoside
  modified_base (16)..(16): 2'-Deoxy-2'-fluoronucleoside
  modified_base (17)..(17): 2'-O-methylnucleoside
  modified_base (18)..(18): 2'-Deoxy-2'-fluoronucleoside
  modified_base (19)..(19): 2'-O-methylnucleoside
  modified_base (20)..(20): 2'-Deoxy-2'-fluoronucleoside
  modified_base (21)..(21): 2'-O-methylnucleoside
gcugugaagagaccuucuaca

SEQ ID NO: 2858 - RNA, 21 nt, Artificial Sequence
  siRNA sense strand against MASP2
  modified_base (1)..(1): 2'-Deoxy-2'-fluoronucleoside
  modified_base (2)..(2): 2'-O-methylnucleoside
  modified_base (3)..(3): 2'-Deoxy-2'-fluoronucleoside
  modified_base (4)..(4): 2'-O-methylnucleoside
  modified_base (5)..(5): 2'-Deoxy-2'-fluoronucleoside
  modified_base (6)..(6): 2'-O-methylnucleoside
  modified_base (7)..(7): 2'-Deoxy-2'-fluoronucleoside
  modified_base (8)..(8): 2'-O-methylnucleoside
  modified_base (9)..(9): 2'-Deoxy-2'-fluoronucleoside
  modified_base (10)..(10): 2'-O-methylnucleoside
  modified_base (11)..(11): 2'-Deoxy-2'-fluoronucleoside
  modified_base (12)..(12): 2'-Deoxy-2'-fluoronucleoside
  modified_base (13)..(13): 2'-O-methylnucleoside
  modified_base (14)..(14): 2'-Deoxy-2'-fluoronucleoside
  modified_base (15)..(15): 2'-O-methylnucleoside
  modified_base (16)..(16): 2'-Deoxy-2'-fluoronucleoside
  modified_base (17)..(17): 2'-O-methylnucleoside
  modified_base (18)..(18): 2'-Deoxy-2'-fluoronucleoside
  modified_base (19)..(19): 2'-O-methylnucleoside
  modified_base (20)..(20): 2'-Deoxy-2'-fluoronucleoside
  modified_base (21)..(21): 2'-O-methylnucleoside
cugugaagagaccuucuacac

SEQ ID NO: 2859 - RNA, 21 nt, Artificial Sequence
  siRNA sense strand against MASP2
  modified_base (1)..(1): 2'-Deoxy-2'-fluoronucleoside
  modified_base (2)..(2): 2'-O-methylnucleoside
  modified_base (3)..(3): 2'-Deoxy-2'-fluoronucleoside
  modified_base (4)..(4): 2'-O-methylnucleoside
  modified_base (5)..(5): 2'-Deoxy-2'-fluoronucleoside
  modified_base (6)..(6): 2'-O-methylnucleoside
  modified_base (7)..(7): 2'-Deoxy-2'-fluoronucleoside
  modified_base (8)..(8): 2'-O-methylnucleoside
  modified_base (9)..(9): 2'-Deoxy-2'-fluoronucleoside
  modified_base (10)..(10): 2'-O-methylnucleoside
  modified_base (11)..(11): 2'-Deoxy-2'-fluoronucleoside
  modified_base (12)..(12): 2'-Deoxy-2'-fluoronucleoside
  modified_base (13)..(13): 2'-O-methylnucleoside
  modified_base (14)..(14): 2'-Deoxy-2'-fluoronucleoside
  modified_base (15)..(15): 2'-O-methylnucleoside
  modified_base (16)..(16): 2'-Deoxy-2'-fluoronucleoside
  modified_base (17)..(17): 2'-O-methylnucleoside
  modified_base (18)..(18): 2'-Deoxy-2'-fluoronucleoside
  modified_base (19)..(19): 2'-O-methylnucleoside
  modified_base (20)..(20): 2'-Deoxy-2'-fluoronucleoside
  modified_base (21)..(21): 2'-O-methylnucleoside
gugaagagaccuucuacacaa

SEQ ID NO: 2860 - RNA, 21 nt, Artificial Sequence
  siRNA sense strand against MASP2
  modified_base (1)..(1): 2'-Deoxy-2'-fluoronucleoside
  modified_base (2)..(2): 2'-O-methylnucleoside
  modified_base (3)..(3): 2'-Deoxy-2'-fluoronucleoside
  modified_base (4)..(4): 2'-O-methylnucleoside
  modified_base (5)..(5): 2'-Deoxy-2'-fluoronucleoside
  modified_base (6)..(6): 2'-O-methylnucleoside
  modified_base (7)..(7): 2'-Deoxy-2'-fluoronucleoside
  modified_base (8)..(8): 2'-O-methylnucleoside
  modified_base (9)..(9): 2'-Deoxy-2'-fluoronucleoside
  modified_base (10)..(10): 2'-O-methylnucleoside
  modified_base (11)..(11): 2'-Deoxy-2'-fluoronucleoside
  modified_base (12)..(12): 2'-Deoxy-2'-fluoronucleoside
  modified_base (13)..(13): 2'-O-methylnucleoside
  modified_base (14)..(14): 2'-Deoxy-2'-fluoronucleoside
  modified_base (15)..(15): 2'-O-methylnucleoside
  modified_base (16)..(16): 2'-Deoxy-2'-fluoronucleoside
  modified_base (17)..(17): 2'-O-methylnucleoside
  modified_base (18)..(18): 2'-Deoxy-2'-fluoronucleoside
  modified_base (19)..(19): 2'-O-methylnucleoside
  modified_base (20)..(20): 2'-Deoxy-2'-fluoronucleoside
  modified_base (21)..(21): 2'-O-methylnucleoside
aaugaaagugaaugaugguaa

SEQ ID NO: 2861 - RNA, 21 nt, Artificial Sequence
  siRNA sense strand against MASP2
  modified_base (1)..(1): 2'-Deoxy-2'-fluoronucleoside
  modified_base (2)..(2): 2'-O-methylnucleoside
  modified_base (3)..(3): 2'-Deoxy-2'-fluoronucleoside
  modified_base (4)..(4): 2'-O-methylnucleoside
  modified_base (5)..(5): 2'-Deoxy-2'-fluoronucleoside
  modified_base (6)..(6): 2'-O-methylnucleoside
  modified_base (7)..(7): 2'-Deoxy-2'-fluoronucleoside
  modified_base (8)..(8): 2'-O-methylnucleoside
  modified_base (9)..(9): 2'-Deoxy-2'-fluoronucleoside
  modified_base (10)..(10): 2'-O-methylnucleoside
  modified_base (11)..(11): 2'-Deoxy-2'-fluoronucleoside
  modified_base (12)..(12): 2'-Deoxy-2'-fluoronucleoside
  modified_base (13)..(13): 2'-O-methylnucleoside
  modified_base (14)..(14): 2'-Deoxy-2'-fluoronucleoside
  modified_base (15)..(15): 2'-O-methylnucleoside
  modified_base (16)..(16): 2'-Deoxy-2'-fluoronucleoside
  modified_base (17)..(17): 2'-O-methylnucleoside
  modified_base (18)..(18): 2'-Deoxy-2'-fluoronucleoside
  modified_base (19)..(19): 2'-O-methylnucleoside
  modified_base (20)..(20): 2'-Deoxy-2'-fluoronucleoside
  modified_base (21)..(21): 2'-O-methylnucleoside
agugaaugaugguaaauaugu

SEQ ID NO: 2862 - RNA, 21 nt, Artificial Sequence
  siRNA sense strand against MASP2
  modified_base (1)..(1): 2'-Deoxy-2'-fluoronucleoside
  modified_base (2)..(2): 2'-O-methylnucleoside
  modified_base (3)..(3): 2'-Deoxy-2'-fluoronucleoside
  modified_base (4)..(4): 2'-O-methylnucleoside
  modified_base (5)..(5): 2'-Deoxy-2'-fluoronucleoside
  modified_base (6)..(6): 2'-O-methylnucleoside
  modified_base (7)..(7): 2'-Deoxy-2'-fluoronucleoside
  modified_base (8)..(8): 2'-O-methylnucleoside
  modified_base (9)..(9): 2'-Deoxy-2'-fluoronucleoside
  modified_base (10)..(10): 2'-O-methylnucleoside
  modified_base (11)..(11): 2'-Deoxy-2'-fluoronucleoside
  modified_base (12)..(12): 2'-Deoxy-2'-fluoronucleoside
  modified_base (13)..(13): 2'-O-methylnucleoside
  modified_base (14)..(14): 2'-Deoxy-2'-fluoronucleoside
  modified_base (15)..(15): 2'-O-methylnucleoside
  modified_base (16)..(16): 2'-Deoxy-2'-fluoronucleoside
  modified_base (17)..(17): 2'-O-methylnucleoside
  modified_base (18)..(18): 2'-Deoxy-2'-fluoronucleoside
  modified_base (19)..(19): 2'-O-methylnucleoside
  modified_base (20)..(20): 2'-Deoxy-2'-fluoronucleoside
  modified_base (21)..(21): 2'-O-methylnucleoside
aaauaugugugugaggcugau

SEQ ID NO: 2863 - RNA, 21 nt, Artificial Sequence
  siRNA sense strand against MASP2
  modified_base (1)..(1): 2'-Deoxy-2'-fluoronucleoside
  modified_base (2)..(2): 2'-O-methylnucleoside
  modified_base (3)..(3): 2'-Deoxy-2'-fluoronucleoside
  modified_base (4)..(4): 2'-O-methylnucleoside
  modified_base (5)..(5): 2'-Deoxy-2'-fluoronucleoside
  modified_base (6)..(6): 2'-O-methylnucleoside
  modified_base (7)..(7): 2'-Deoxy-2'-fluoronucleoside
  modified_base (8)..(8): 2'-O-methylnucleoside
  modified_base (9)..(9): 2'-Deoxy-2'-fluoronucleoside
  modified_base (10)..(10): 2'-O-methylnucleoside
  modified_base (11)..(11): 2'-Deoxy-2'-fluoronucleoside
  modified_base (12)..(12): 2'-Deoxy-2'-fluoronucleoside
  modified_base (13)..(13): 2'-O-methylnucleoside
  modified_base (14)..(14): 2'-Deoxy-2'-fluoronucleoside
  modified_base (15)..(15): 2'-O-methylnucleoside
  modified_base (16)..(16): 2'-Deoxy-2'-fluoronucleoside
  modified_base (17)..(17): 2'-O-methylnucleoside
  modified_base (18)..(18): 2'-Deoxy-2'-fluoronucleoside
  modified_base (19)..(19): 2'-O-methylnucleoside
  modified_base (20)..(20): 2'-Deoxy-2'-fluoronucleoside
  modified_base (21)..(21): 2'-O-methylnucleoside
augugugugaggcugauggau

SEQ ID NO: 2864 - RNA, 21 nt, Artificial Sequence
  siRNA sense strand against MASP2
  modified_base (1)..(1): 2'-Deoxy-2'-fluoronucleoside
  modified_base (2)..(2): 2'-O-methylnucleoside
  modified_base (3)..(3): 2'-Deoxy-2'-fluoronucleoside
  modified_base (4)..(4): 2'-O-methylnucleoside
  modified_base (5)..(5): 2'-Deoxy-2'-fluoronucleoside
  modified_base (6)..(6): 2'-O-methylnucleoside
  modified_base (7)..(7): 2'-Deoxy-2'-fluoronucleoside
  modified_base (8)..(8): 2'-O-methylnucleoside
  modified_base (9)..(9): 2'-Deoxy-2'-fluoronucleoside
  modified_base (10)..(10): 2'-O-methylnucleoside
  modified_base (11)..(11): 2'-Deoxy-2'-fluoronucleoside
  modified_base (12)..(12): 2'-Deoxy-2'-fluoronucleoside
  modified_base (13)..(13): 2'-O-methylnucleoside
  modified_base (14)..(14): 2'-Deoxy-2'-fluoronucleoside
  modified_base (15)..(15): 2'-O-methylnucleoside
  modified_base (16)..(16): 2'-Deoxy-2'-fluoronucleoside
  modified_base (17)..(17): 2'-O-methylnucleoside
  modified_base (18)..(18): 2'-Deoxy-2'-fluoronucleoside
  modified_base (19)..(19): 2'-O-methylnucleoside
  modified_base (20)..(20): 2'-Deoxy-2'-fluoronucleoside
  modified_base (21)..(21): 2'-O-methylnucleoside
ugugugugaggcugauggauu

SEQ ID NO: 2865 - RNA, 21 nt, Artificial Sequence
  siRNA sense strand against MASP2
  modified_base (1)..(1): 2'-Deoxy-2'-fluoronucleoside
  modified_base (2)..(2): 2'-O-methylnucleoside
  modified_base (3)..(3): 2'-Deoxy-2'-fluoronucleoside
  modified_base (4)..(4): 2'-O-methylnucleoside
  modified_base (5)..(5): 2'-Deoxy-2'-fluoronucleoside
  modified_base (6)..(6): 2'-O-methylnucleoside
  modified_base (7)..(7): 2'-Deoxy-2'-fluoronucleoside
  modified_base (8)..(8): 2'-O-methylnucleoside
  modified_base (9)..(9): 2'-Deoxy-2'-fluoronucleoside
  modified_base (10)..(10): 2'-O-methylnucleoside
  modified_base (11)..(11): 2'-Deoxy-2'-fluoronucleoside
  modified_base (12)..(12): 2'-Deoxy-2'-fluoronucleoside
  modified_base (13)..(13): 2'-O-methylnucleoside
  modified_base (14)..(14): 2'-Deoxy-2'-fluoronucleoside
  modified_base (15)..(15): 2'-O-methylnucleoside
  modified_base (16)..(16): 2'-Deoxy-2'-fluoronucleoside
  modified_base (17)..(17): 2'-O-methylnucleoside
  modified_base (18)..(18): 2'-Deoxy-2'-fluoronucleoside
  modified_base (19)..(19): 2'-O-methylnucleoside
  modified_base (20)..(20): 2'-Deoxy-2'-fluoronucleoside
  modified_base (21)..(21): 2'-O-methylnucleoside
gugugugaggcugauggauuc

SEQ ID NO: 2866 - RNA, 21 nt, Artificial Sequence
  siRNA sense strand against MASP2
  modified_base (1)..(1): 2'-Deoxy-2'-fluoronucleoside
  modified_base (2)..(2): 2'-O-methylnucleoside
  modified_base (3)..(3): 2'-Deoxy-2'-fluoronucleoside
  modified_base (4)..(4): 2'-O-methylnucleoside
  modified_base (5)..(5): 2'-Deoxy-2'-fluoronucleoside
  modified_base (6)..(6): 2'-O-methylnucleoside
  modified_base (7)..(7): 2'-Deoxy-2'-fluoronucleoside
  modified_base (8)..(8): 2'-O-methylnucleoside
  modified_base (9)..(9): 2'-Deoxy-2'-fluoronucleoside
  modified_base (10)..(10): 2'-O-methylnucleoside
  modified_base (11)..(11): 2'-Deoxy-2'-fluoronucleoside
  modified_base (12)..(12): 2'-Deoxy-2'-fluoronucleoside
  modified_base (13)..(13): 2'-O-methylnucleoside
  modified_base (14)..(14): 2'-Deoxy-2'-fluoronucleoside
  modified_base (15)..(15): 2'-O-methylnucleoside
  modified_base (16)..(16): 2'-Deoxy-2'-fluoronucleoside
  modified_base (17)..(17): 2'-O-methylnucleoside
  modified_base (18)..(18): 2'-Deoxy-2'-fluoronucleoside
  modified_base (19)..(19): 2'-O-methylnucleoside
  modified_base (20)..(20): 2'-Deoxy-2'-fluoronucleoside
  modified_base (21)..(21): 2'-O-methylnucleoside
ugugugaggcugauggauucu

SEQ ID NO: 2867 - RNA, 21 nt, Artificial Sequence
  siRNA sense strand against MASP2
  modified_base (1)..(1): 2'-Deoxy-2'-fluoronucleoside
  modified_base (2)..(2): 2'-O-methylnucleoside
  modified_base (3)..(3): 2'-Deoxy-2'-fluoronucleoside
  modified_base (4)..(4): 2'-O-methylnucleoside
  modified_base (5)..(5): 2'-Deoxy-2'-fluoronucleoside
  modified_base (6)..(6): 2'-O-methylnucleoside
  modified_base (7)..(7): 2'-Deoxy-2'-fluoronucleoside
  modified_base (8)..(8): 2'-O-methylnucleoside
  modified_base (9)..(9): 2'-Deoxy-2'-fluoronucleoside
  modified_base (10)..(10): 2'-O-methylnucleoside
  modified_base (11)..(11): 2'-Deoxy-2'-fluoronucleoside
  modified_base (12)..(12): 2'-Deoxy-2'-fluoronucleoside
  modified_base (13)..(13): 2'-O-methylnucleoside
  modified_base (14)..(14): 2'-Deoxy-2'-fluoronucleoside
  modified_base (15)..(15): 2'-O-methylnucleoside
  modified_base (16)..(16): 2'-Deoxy-2'-fluoronucleoside
  modified_base (17)..(17): 2'-O-methylnucleoside
  modified_base (18)..(18): 2'-Deoxy-2'-fluoronucleoside
  modified_base (19)..(19): 2'-O-methylnucleoside
  modified_base (20)..(20): 2'-Deoxy-2'-fluoronucleoside
  modified_base (21)..(21): 2'-O-methylnucleoside
gugaggcugauggauucugga

SEQ ID NO: 2868 - RNA, 21 nt, Artificial Sequence
  siRNA sense strand against MASP2
  modified_base (1)..(1): 2'-Deoxy-2'-fluoronucleoside
  modified_base (2)..(2): 2'-O-methylnucleoside
  modified_base (3)..(3): 2'-Deoxy-2'-fluoronucleoside
  modified_base (4)..(4): 2'-O-methylnucleoside
  modified_base (5)..(5): 2'-Deoxy-2'-fluoronucleoside
  modified_base (6)..(6): 2'-O-methylnucleoside
  modified_base (7)..(7): 2'-Deoxy-2'-fluoronucleoside
  modified_base (8)..(8): 2'-O-methylnucleoside
  modified_base (9)..(9): 2'-Deoxy-2'-fluoronucleoside
  modified_base (10)..(10): 2'-O-methylnucleoside
  modified_base (11)..(11): 2'-Deoxy-2'-fluoronucleoside
  modified_base (12)..(12): 2'-Deoxy-2'-fluoronucleoside
  modified_base (13)..(13): 2'-O-methylnucleoside
  modified_base (14)..(14): 2'-Deoxy-2'-fluoronucleoside
  modified_base (15)..(15): 2'-O-methylnucleoside
  modified_base (16)..(16): 2'-Deoxy-2'-fluoronucleoside
  modified_base (17)..(17): 2'-O-methylnucleoside
  modified_base (18)..(18): 2'-Deoxy-2'-fluoronucleoside
  modified_base (19)..(19): 2'-O-methylnucleoside
  modified_base (20)..(20): 2'-Deoxy-2'-fluoronucleoside
  modified_base (21)..(21): 2'-O-methylnucleoside
aggcugauggauucuggacga

SEQ ID NO: 2869 - RNA, 21 nt, Artificial Sequence
  siRNA sense strand against MASP2
  modified_base (1)..(1): 2'-Deoxy-2'-fluoronucleoside
  modified_base (2)..(2): 2'-O-methylnucleoside
  modified_base (3)..(3): 2'-Deoxy-2'-fluoronucleoside
  modified_base (4)..(4): 2'-O-methylnucleoside
  modified_base (5)..(5): 2'-Deoxy-2'-fluoronucleoside
  modified_base (6)..(6): 2'-O-methylnucleoside
  modified_base (7)..(7): 2'-Deoxy-2'-fluoronucleoside
  modified_base (8)..(8): 2'-O-methylnucleoside
  modified_base (9)..(9): 2'-Deoxy-2'-fluoronucleoside
  modified_base (10)..(10): 2'-O-methylnucleoside
  modified_base (11)..(11): 2'-Deoxy-2'-fluoronucleoside
  modified_base (12)..(12): 2'-Deoxy-2'-fluoronucleoside
  modified_base (13)..(13): 2'-O-methylnucleoside
  modified_base (14)..(14): 2'-Deoxy-2'-fluoronucleoside
  modified_base (15)..(15): 2'-O-methylnucleoside
  modified_base (16)..(16): 2'-Deoxy-2'-fluoronucleoside
  modified_base (17)..(17): 2'-O-methylnucleoside
  modified_base (18)..(18): 2'-Deoxy-2'-fluoronucleoside
  modified_base (19)..(19): 2'-O-methylnucleoside
  modified_base (20)..(20): 2'-Deoxy-2'-fluoronucleoside
  modified_base (21)..(21): 2'-O-methylnucleoside
cugauggauucuggacgagcu

SEQ ID NO: 2870 - RNA, 21 nt, Artificial Sequence
  siRNA sense strand against MASP2
  modified_base (1)..(1): 2'-Deoxy-2'-fluoronucleoside
  modified_base (2)..(2): 2'-O-methylnucleoside
  modified_base (3)..(3): 2'-Deoxy-2'-fluoronucleoside
  modified_base (4)..(4): 2'-O-methylnucleoside
  modified_base (5)..(5): 2'-Deoxy-2'-fluoronucleoside
  modified_base (6)..(6): 2'-O-methylnucleoside
  modified_base (7)..(7): 2'-Deoxy-2'-fluoronucleoside
  modified_base (8)..(8): 2'-O-methylnucleoside
  modified_base (9)..(9): 2'-Deoxy-2'-fluoronucleoside
  modified_base (10)..(10): 2'-O-methylnucleoside
  modified_base (11)..(11): 2'-Deoxy-2'-fluoronucleoside
  modified_base (12)..(12): 2'-Deoxy-2'-fluoronucleoside
  modified_base (13)..(13): 2'-O-methylnucleoside
  modified_base (14)..(14): 2'-Deoxy-2'-fluoronucleoside
  modified_base (15)..(15): 2'-O-methylnucleoside
  modified_base (16)..(16): 2'-Deoxy-2'-fluoronucleoside
  modified_base (17)..(17): 2'-O-methylnucleoside
  modified_base (18)..(18): 2'-Deoxy-2'-fluoronucleoside
  modified_base (19)..(19): 2'-O-methylnucleoside
  modified_base (20)..(20): 2'-Deoxy-2'-fluoronucleoside
  modified_base (21)..(21): 2'-O-methylnucleoside
cuggacgagcuccaaaggaga

SEQ ID NO: 2871 - RNA, 21 nt, Artificial Sequence
  siRNA sense strand against MASP2
  modified_base (1)..(1): 2'-Deoxy-2'-fluoronucleoside
  modified_base (2)..(2): 2'-O-methylnucleoside
  modified_base (3)..(3): 2'-Deoxy-2'-fluoronucleoside
  modified_base (4)..(4): 2'-O-methylnucleoside
  modified_base (5)..(5): 2'-Deoxy-2'-fluoronucleoside
  modified_base (6)..(6): 2'-O-methylnucleoside
  modified_base (7)..(7): 2'-Deoxy-2'-fluoronucleoside
  modified_base (8)..(8): 2'-O-methylnucleoside
  modified_base (9)..(9): 2'-Deoxy-2'-fluoronucleoside
  modified_base (10)..(10): 2'-O-methylnucleoside
  modified_base (11)..(11): 2'-Deoxy-2'-fluoronucleoside
  modified_base (12)..(12): 2'-Deoxy-2'-fluoronucleoside
  modified_base (13)..(13): 2'-O-methylnucleoside
  modified_base (14)..(14): 2'-Deoxy-2'-fluoronucleoside
  modified_base (15)..(15): 2'-O-methylnucleoside
  modified_base (16)..(16): 2'-Deoxy-2'-fluoronucleoside
  modified_base (17)..(17): 2'-O-methylnucleoside
  modified_base (18)..(18): 2'-Deoxy-2'-fluoronucleoside
  modified_base (19)..(19): 2'-O-methylnucleoside
  modified_base (20)..(20): 2'-Deoxy-2'-fluoronucleoside
  modified_base (21)..(21): 2'-O-methylnucleoside
agcuccaaaggagaaaaauca

SEQ ID NO: 2872 - RNA, 21 nt, Artificial Sequence
  siRNA sense strand against MASP2
  modified_base (1)..(1): 2'-Deoxy-2'-fluoronucleoside
  modified_base (2)..(2): 2'-O-methylnucleoside
  modified_base (3)..(3): 2'-Deoxy-2'-fluoronucleoside
  modified_base (4)..(4): 2'-O-methylnucleoside
  modified_base (5)..(5): 2'-Deoxy-2'-fluoronucleoside
  modified_base (6)..(6): 2'-O-methylnucleoside
  modified_base (7)..(7): 2'-Deoxy-2'-fluoronucleoside
  modified_base (8)..(8): 2'-O-methylnucleoside
  modified_base (9)..(9): 2'-Deoxy-2'-fluoronucleoside
  modified_base (10)..(10): 2'-O-methylnucleoside
  modified_base (11)..(11): 2'-Deoxy-2'-fluoronucleoside
  modified_base (12)..(12): 2'-Deoxy-2'-fluoronucleoside
  modified_base (13)..(13): 2'-O-methylnucleoside
  modified_base (14)..(14): 2'-Deoxy-2'-fluoronucleoside
  modified_base (15)..(15): 2'-O-methylnucleoside
  modified_base (16)..(16): 2'-Deoxy-2'-fluoronucleoside
  modified_base (17)..(17): 2'-O-methylnucleoside
  modified_base (18)..(18): 2'-Deoxy-2'-fluoronucleoside
  modified_base (19)..(19): 2'-O-methylnucleoside
  modified_base (20)..(20): 2'-Deoxy-2'-fluoronucleoside
  modified_base (21)..(21): 2'-O-methylnucleoside
agggcaaaaggcaaaaccugg

SEQ ID NO: 2873 - RNA, 21 nt, Artificial Sequence
  siRNA sense strand against MASP2
  modified_base (1)..(1): 2'-Deoxy-2'-fluoronucleoside
  modified_base (2)..(2): 2'-O-methylnucleoside
  modified_base (3)..(3): 2'-Deoxy-2'-fluoronucleoside
  modified_base (4)..(4): 2'-O-methylnucleoside
  modified_base (5)..(5): 2'-Deoxy-2'-fluoronucleoside
  modified_base (6)..(6): 2'-O-methylnucleoside
  modified_base (7)..(7): 2'-Deoxy-2'-fluoronucleoside
  modified_base (8)..(8): 2'-O-methylnucleoside
  modified_base (9)..(9): 2'-Deoxy-2'-fluoronucleoside
  modified_base (10)..(10): 2'-O-methylnucleoside
  modified_base (11)..(11): 2'-Deoxy-2'-fluoronucleoside
  modified_base (12)..(12): 2'-Deoxy-2'-fluoronucleoside
  modified_base (13)..(13): 2'-O-methylnucleoside
  modified_base (14)..(14): 2'-Deoxy-2'-fluoronucleoside
  modified_base (15)..(15): 2'-O-methylnucleoside
  modified_base (16)..(16): 2'-Deoxy-2'-fluoronucleoside
  modified_base (17)..(17): 2'-O-methylnucleoside
  modified_base (18)..(18): 2'-Deoxy-2'-fluoronucleoside
  modified_base (19)..(19): 2'-O-methylnucleoside
  modified_base (20)..(20): 2'-Deoxy-2'-fluoronucleoside
  modified_base (21)..(21): 2'-O-methylnucleoside
aaaaggcaaaaccuggugauu

SEQ ID NO: 2874 - RNA, 21 nt, Artificial Sequence
  siRNA sense strand against MASP2
  modified_base (1)..(1): 2'-Deoxy-2'-fluoronucleoside
  modified_base (2)..(2): 2'-O-methylnucleoside
  modified_base (3)..(3): 2'-Deoxy-2'-fluoronucleoside
  modified_base (4)..(4): 2'-O-methylnucleoside
  modified_base (5)..(5): 2'-Deoxy-2'-fluoronucleoside
  modified_base (6)..(6): 2'-O-methylnucleoside
  modified_base (7)..(7): 2'-Deoxy-2'-fluoronucleoside
  modified_base (8)..(8): 2'-O-methylnucleoside
  modified_base (9)..(9): 2'-Deoxy-2'-fluoronucleoside
  modified_base (10)..(10): 2'-O-methylnucleoside
  modified_base (11)..(11): 2'-Deoxy-2'-fluoronucleoside
  modified_base (12)..(12): 2'-Deoxy-2'-fluoronucleoside
  modified_base (13)..(13): 2'-O-methylnucleoside
  modified_base (14)..(14): 2'-Deoxy-2'-fluoronucleoside
  modified_base (15)..(15): 2'-O-methylnucleoside
  modified_base (16)..(16): 2'-Deoxy-2'-fluoronucleoside
  modified_base (17)..(17): 2'-O-methylnucleoside
  modified_base (18)..(18): 2'-Deoxy-2'-fluoronucleoside
  modified_base (19)..(19): 2'-O-methylnucleoside
  modified_base (20)..(20): 2'-Deoxy-2'-fluoronucleoside
  modified_base (21)..(21): 2'-O-methylnucleoside
aaaggcaaaaccuggugauuu

SEQ ID NO: 2875 - RNA, 21 nt, Artificial Sequence
  siRNA sense strand against MASP2
  modified_base (1)..(1): 2'-Deoxy-2'-fluoronucleoside
  modified_base (2)..(2): 2'-O-methylnucleoside
  modified_base (3)..(3): 2'-Deoxy-2'-fluoronucleoside
  modified_base (4)..(4): 2'-O-methylnucleoside
  modified_base (5)..(5): 2'-Deoxy-2'-fluoronucleoside
  modified_base (6)..(6): 2'-O-methylnucleoside
  modified_base (7)..(7): 2'-Deoxy-2'-fluoronucleoside
  modified_base (8)..(8): 2'-O-methylnucleoside
  modified_base (9)..(9): 2'-Deoxy-2'-fluoronucleoside
  modified_base (10)..(10): 2'-O-methylnucleoside
  modified_base (11)..(11): 2'-Deoxy-2'-fluoronucleoside
  modified_base (12)..(12): 2'-Deoxy-2'-fluoronucleoside
  modified_base (13)..(13): 2'-O-methylnucleoside
  modified_base (14)..(14): 2'-Deoxy-2'-fluoronucleoside
  modified_base (15)..(15): 2'-O-methylnucleoside
  modified_base (16)..(16): 2'-Deoxy-2'-fluoronucleoside
  modified_base (17)..(17): 2'-O-methylnucleoside
  modified_base (18)..(18): 2'-Deoxy-2'-fluoronucleoside
  modified_base (19)..(19): 2'-O-methylnucleoside
  modified_base (20)..(20): 2'-Deoxy-2'-fluoronucleoside
  modified_base (21)..(21): 2'-O-methylnucleoside
aaggcaaaaccuggugauuuu

SEQ ID NO: 2876 - RNA, 21 nt, Artificial Sequence
  siRNA sense strand against MASP2
  modified_base (1)..(1): 2'-Deoxy-2'-fluoronucleoside
  modified_base (2)..(2): 2'-O-methylnucleoside
  modified_base (3)..(3): 2'-Deoxy-2'-fluoronucleoside
  modified_base (4)..(4): 2'-O-methylnucleoside
  modified_base (5)..(5): 2'-Deoxy-2'-fluoronucleoside
  modified_base (6)..(6): 2'-O-methylnucleoside
  modified_base (7)..(7): 2'-Deoxy-2'-fluoronucleoside
  modified_base (8)..(8): 2'-O-methylnucleoside
  modified_base (9)..(9): 2'-Deoxy-2'-fluoronucleoside
  modified_base (10)..(10): 2'-O-methylnucleoside
  modified_base (11)..(11): 2'-Deoxy-2'-fluoronucleoside
  modified_base (12)..(12): 2'-Deoxy-2'-fluoronucleoside
  modified_base (13)..(13): 2'-O-methylnucleoside
  modified_base (14)..(14): 2'-Deoxy-2'-fluoronucleoside
  modified_base (15)..(15): 2'-O-methylnucleoside
  modified_base (16)..(16): 2'-Deoxy-2'-fluoronucleoside
  modified_base (17)..(17): 2'-O-methylnucleoside
  modified_base (18)..(18): 2'-Deoxy-2'-fluoronucleoside
  modified_base (19)..(19): 2'-O-methylnucleoside
  modified_base (20)..(20): 2'-Deoxy-2'-fluoronucleoside
  modified_base (21)..(21): 2'-O-methylnucleoside
accuggugauuuuccuuggca

SEQ ID NO: 2877 - RNA, 21 nt, Artificial Sequence
  siRNA sense strand against MASP2
  modified_base (1)..(1): 2'-Deoxy-2'-fluoronucleoside
  modified_base (2)..(2): 2'-O-methylnucleoside
  modified_base (3)..(3): 2'-Deoxy-2'-fluoronucleoside
  modified_base (4)..(4): 2'-O-methylnucleoside
  modified_base (5)..(5): 2'-Deoxy-2'-fluoronucleoside
  modified_base (6)..(6): 2'-O-methylnucleoside
  modified_base (7)..(7): 2'-Deoxy-2'-fluoronucleoside
  modified_base (8)..(8): 2'-O-methylnucleoside
  modified_base (9)..(9): 2'-Deoxy-2'-fluoronucleoside
  modified_base (10)..(10): 2'-O-methylnucleoside
  modified_base (11)..(11): 2'-Deoxy-2'-fluoronucleoside
  modified_base (12)..(12): 2'-Deoxy-2'-fluoronucleoside
  modified_base (13)..(13): 2'-O-methylnucleoside
  modified_base (14)..(14): 2'-Deoxy-2'-fluoronucleoside
  modified_base (15)..(15): 2'-O-methylnucleoside
  modified_base (16)..(16): 2'-Deoxy-2'-fluoronucleoside
  modified_base (17)..(17): 2'-O-methylnucleoside
  modified_base (18)..(18): 2'-Deoxy-2'-fluoronucleoside
  modified_base (19)..(19): 2'-O-methylnucleoside
  modified_base (20)..(20): 2'-Deoxy-2'-fluoronucleoside
  modified_base (21)..(21): 2'-O-methylnucleoside
ccuggugauuuuccuuggcaa

SEQ ID NO: 2878 - RNA, 21 nt, Artificial Sequence
  siRNA sense strand against MASP2
  modified_base (1)..(1): 2'-Deoxy-2'-fluoronucleoside
  modified_base (2)..(2): 2'-O-methylnucleoside
  modified_base (3)..(3): 2'-Deoxy-2'-fluoronucleoside
  modified_base (4)..(4): 2'-O-methylnucleoside
  modified_base (5)..(5): 2'-Deoxy-2'-fluoronucleoside
  modified_base (6)..(6): 2'-O-methylnucleoside
  modified_base (7)..(7): 2'-Deoxy-2'-fluoronucleoside
  modified_base (8)..(8): 2'-O-methylnucleoside
  modified_base (9)..(9): 2'-Deoxy-2'-fluoronucleoside
  modified_base (10)..(10): 2'-O-methylnucleoside
  modified_base (11)..(11): 2'-Deoxy-2'-fluoronucleoside
  modified_base (12)..(12): 2'-Deoxy-2'-fluoronucleoside
  modified_base (13)..(13): 2'-O-methylnucleoside
  modified_base (14)..(14): 2'-Deoxy-2'-fluoronucleoside
  modified_base (15)..(15): 2'-O-methylnucleoside
  modified_base (16)..(16): 2'-Deoxy-2'-fluoronucleoside
  modified_base (17)..(17): 2'-O-methylnucleoside
  modified_base (18)..(18): 2'-Deoxy-2'-fluoronucleoside
  modified_base (19)..(19): 2'-O-methylnucleoside
  modified_base (20)..(20): 2'-Deoxy-2'-fluoronucleoside
  modified_base (21)..(21): 2'-O-methylnucleoside
uggugauuuuccuuggcaagu

SEQ ID NO: 2879 - RNA, 21 nt, Artificial Sequence
  siRNA sense strand against MASP2
  modified_base (1)..(1): 2'-Deoxy-2'-fluoronucleoside
  modified_base (2)..(2): 2'-O-methylnucleoside
  modified_base (3)..(3): 2'-Deoxy-2'-fluoronucleoside
  modified_base (4)..(4): 2'-O-methylnucleoside
  modified_base (5)..(5): 2'-Deoxy-2'-fluoronucleoside
  modified_base (6)..(6): 2'-O-methylnucleoside
  modified_base (7)..(7): 2'-Deoxy-2'-fluoronucleoside
  modified_base (8)..(8): 2'-O-methylnucleoside
  modified_base (9)..(9): 2'-Deoxy-2'-fluoronucleoside
  modified_base (10)..(10): 2'-O-methylnucleoside
  modified_base (11)..(11): 2'-Deoxy-2'-fluoronucleoside
  modified_base (12)..(12): 2'-Deoxy-2'-fluoronucleoside
  modified_base (13)..(13): 2'-O-methylnucleoside
  modified_base (14)..(14): 2'-Deoxy-2'-fluoronucleoside
  modified_base (15)..(15): 2'-O-methylnucleoside
  modified_base (16)..(16): 2'-Deoxy-2'-fluoronucleoside
  modified_base (17)..(17): 2'-O-methylnucleoside
  modified_base (18)..(18): 2'-Deoxy-2'-fluoronucleoside
  modified_base (19)..(19): 2'-O-methylnucleoside
  modified_base (20)..(20): 2'-Deoxy-2'-fluoronucleoside
  modified_base (21)..(21): 2'-O-methylnucleoside
uuccuuggcaaguccugauau

SEQ ID NO: 2880 - RNA, 21 nt, Artificial Sequence
  siRNA sense strand against MASP2
  modified_base (1)..(1): 2'-Deoxy-2'-fluoronucleoside
  modified_base (2)..(2): 2'-O-methylnucleoside
  modified_base (3)..(3): 2'-Deoxy-2'-fluoronucleoside
  modified_base (4)..(4): 2'-O-methylnucleoside
  modified_base (5)..(5): 2'-Deoxy-2'-fluoronucleoside
  modified_base (6)..(6): 2'-O-methylnucleoside
  modified_base (7)..(7): 2'-Deoxy-2'-fluoronucleoside
  modified_base (8)..(8): 2'-O-methylnucleoside
  modified_base (9)..(9): 2'-Deoxy-2'-fluoronucleoside
  modified_base (10)..(10): 2'-O-methylnucleoside
  modified_base (11)..(11): 2'-Deoxy-2'-fluoronucleoside
  modified_base (12)..(12): 2'-Deoxy-2'-fluoronucleoside
  modified_base (13)..(13): 2'-O-methylnucleoside
  modified_base (14)..(14): 2'-Deoxy-2'-fluoronucleoside
  modified_base (15)..(15): 2'-O-methylnucleoside
  modified_base (16)..(16): 2'-Deoxy-2'-fluoronucleoside
  modified_base (17)..(17): 2'-O-methylnucleoside
  modified_base (18)..(18): 2'-Deoxy-2'-fluoronucleoside
  modified_base (19)..(19): 2'-O-methylnucleoside
  modified_base (20)..(20): 2'-Deoxy-2'-fluoronucleoside
  modified_base (21)..(21): 2'-O-methylnucleoside
uuggcaaguccugauauuagg

SEQ ID NO: 2881 - RNA, 21 nt, Artificial Sequence
  siRNA sense strand against MASP2
  modified_base (1)..(1): 2'-Deoxy-2'-fluoronucleoside
  modified_base (2)..(2): 2'-O-methylnucleoside
  modified_base (3)..(3): 2'-Deoxy-2'-fluoronucleoside
  modified_base (4)..(4): 2'-O-methylnucleoside
  modified_base (5)..(5): 2'-Deoxy-2'-fluoronucleoside
  modified_base (6)..(6): 2'-O-methylnucleoside
  modified_base (7)..(7): 2'-Deoxy-2'-fluoronucleoside
  modified_base (8)..(8): 2'-O-methylnucleoside
  modified_base (9)..(9): 2'-Deoxy-2'-fluoronucleoside
  modified_base (10)..(10): 2'-O-methylnucleoside
  modified_base (11)..(11): 2'-Deoxy-2'-fluoronucleoside
  modified_base (12)..(12): 2'-Deoxy-2'-fluoronucleoside
  modified_base (13)..(13): 2'-O-methylnucleoside
  modified_base (14)..(14): 2'-Deoxy-2'-fluoronucleoside
  modified_base (15)..(15): 2'-O-methylnucleoside
  modified_base (16)..(16): 2'-Deoxy-2'-fluoronucleoside
  modified_base (17)..(17): 2'-O-methylnucleoside
  modified_base (18)..(18): 2'-Deoxy-2'-fluoronucleoside
  modified_base (19)..(19): 2'-O-methylnucleoside
  modified_base (20)..(20): 2'-Deoxy-2'-fluoronucleoside
  modified_base (21)..(21): 2'-O-methylnucleoside
agcaggugcacuuuuauauga

SEQ ID NO: 2882 - RNA, 21 nt, Artificial Sequence
  siRNA sense strand against MASP2
  modified_base (1)..(1): 2'-Deoxy-2'-fluoronucleoside
  modified_base (2)..(2): 2'-O-methylnucleoside
  modified_base (3)..(3): 2'-Deoxy-2'-fluoronucleoside
  modified_base (4)..(4): 2'-O-methylnucleoside
  modified_base (5)..(5): 2'-Deoxy-2'-fluoronucleoside
  modified_base (6)..(6): 2'-O-methylnucleoside
  modified_base (7)..(7): 2'-Deoxy-2'-fluoronucleoside
  modified_base (8)..(8): 2'-O-methylnucleoside
  modified_base (9)..(9): 2'-Deoxy-2'-fluoronucleoside
  modified_base (10)..(10): 2'-O-methylnucleoside
  modified_base (11)..(11): 2'-Deoxy-2'-fluoronucleoside
  modified_base (12)..(12): 2'-Deoxy-2'-fluoronucleoside
  modified_base (13)..(13): 2'-O-methylnucleoside
  modified_base (14)..(14): 2'-Deoxy-2'-fluoronucleoside
  modified_base (15)..(15): 2'-O-methylnucleoside
  modified_base (16)..(16): 2'-Deoxy-2'-fluoronucleoside
  modified_base (17)..(17): 2'-O-methylnucleoside
  modified_base (18)..(18): 2'-Deoxy-2'-fluoronucleoside
  modified_base (19)..(19): 2'-O-methylnucleoside
  modified_base (20)..(20): 2'-Deoxy-2'-fluoronucleoside
  modified_base (21)..(21): 2'-O-methylnucleoside
caggugcacuuuuauaugaca

SEQ ID NO: 2883 - RNA, 21 nt, Artificial Sequence
  siRNA sense strand against MASP2
  modified_base (1)..(1): 2'-Deoxy-2'-fluoronucleoside
  modified_base (2)..(2): 2'-O-methylnucleoside
  modified_base (3)..(3): 2'-Deoxy-2'-fluoronucleoside
  modified_base (4)..(4): 2'-O-methylnucleoside
  modified_base (5)..(5): 2'-Deoxy-2'-fluoronucleoside
  modified_base (6)..(6): 2'-O-methylnucleoside
  modified_base (7)..(7): 2'-Deoxy-2'-fluoronucleoside
  modified_base (8)..(8): 2'-O-methylnucleoside
  modified_base (9)..(9): 2'-Deoxy-2'-fluoronucleoside
  modified_base (10)..(10): 2'-O-methylnucleoside
  modified_base (11)..(11): 2'-Deoxy-2'-fluoronucleoside
  modified_base (12)..(12): 2'-Deoxy-2'-fluoronucleoside
  modified_base (13)..(13): 2'-O-methylnucleoside
  modified_base (14)..(14): 2'-Deoxy-2'-fluoronucleoside
  modified_base (15)..(15): 2'-O-methylnucleoside
  modified_base (16)..(16): 2'-Deoxy-2'-fluoronucleoside
  modified_base (17)..(17): 2'-O-methylnucleoside
  modified_base (18)..(18): 2'-Deoxy-2'-fluoronucleoside
  modified_base (19)..(19): 2'-O-methylnucleoside
  modified_base (20)..(20): 2'-Deoxy-2'-fluoronucleoside
  modified_base (21)..(21): 2'-O-methylnucleoside
uaacagcugcucaugccgucu

SEQ ID NO: 2884 - RNA, 21 nt, Artificial Sequence
  siRNA sense strand against MASP2
  modified_base (1)..(1): 2'-Deoxy-2'-fluoronucleoside
  modified_base (2)..(2): 2'-O-methylnucleoside
  modified_base (3)..(3): 2'-Deoxy-2'-fluoronucleoside
  modified_base (4)..(4): 2'-O-methylnucleoside
  modified_base (5)..(5): 2'-Deoxy-2'-fluoronucleoside
  modified_base (6)..(6): 2'-O-methylnucleoside
  modified_base (7)..(7): 2'-Deoxy-2'-fluoronucleoside
  modified_base (8)..(8): 2'-O-methylnucleoside
  modified_base (9)..(9): 2'-Deoxy-2'-fluoronucleoside
  modified_base (10)..(10): 2'-O-methylnucleoside
  modified_base (11)..(11): 2'-Deoxy-2'-fluoronucleoside
  modified_base (12)..(12): 2'-Deoxy-2'-fluoronucleoside
  modified_base (13)..(13): 2'-O-methylnucleoside
  modified_base (14)..(14): 2'-Deoxy-2'-fluoronucleoside
  modified_base (15)..(15): 2'-O-methylnucleoside
  modified_base (16)..(16): 2'-Deoxy-2'-fluoronucleoside
  modified_base (17)..(17): 2'-O-methylnucleoside
  modified_base (18)..(18): 2'-Deoxy-2'-fluoronucleoside
  modified_base (19)..(19): 2'-O-methylnucleoside
  modified_base (20)..(20): 2'-Deoxy-2'-fluoronucleoside
  modified_base (21)..(21): 2'-O-methylnucleoside
uucgaaugggcacccugaaaa

SEQ ID NO: 2885 - RNA, 21 nt, Artificial Sequence
  siRNA sense strand against MASP2
  modified_base (1)..(1): 2'-Deoxy-2'-fluoronucleoside
  modified_base (2)..(2): 2'-O-methylnucleoside
  modified_base (3)..(3): 2'-Deoxy-2'-fluoronucleoside
  modified_base (4)..(4): 2'-O-methylnucleoside
  modified_base (5)..(5): 2'-Deoxy-2'-fluoronucleoside
  modified_base (6)..(6): 2'-O-methylnucleoside
  modified_base (7)..(7): 2'-Deoxy-2'-fluoronucleoside
  modified_base (8)..(8): 2'-O-methylnucleoside
  modified_base (9)..(9): 2'-Deoxy-2'-fluoronucleoside
  modified_base (10)..(10): 2'-O-methylnucleoside
  modified_base (11)..(11): 2'-Deoxy-2'-fluoronucleoside
  modified_base (12)..(12): 2'-Deoxy-2'-fluoronucleoside
  modified_base (13)..(13): 2'-O-methylnucleoside
  modified_base (14)..(14): 2'-Deoxy-2'-fluoronucleoside
  modified_base (15)..(15): 2'-O-methylnucleoside
  modified_base (16)..(16): 2'-Deoxy-2'-fluoronucleoside
  modified_base (17)..(17): 2'-O-methylnucleoside
  modified_base (18)..(18): 2'-Deoxy-2'-fluoronucleoside
  modified_base (19)..(19): 2'-O-methylnucleoside
  modified_base (20)..(20): 2'-Deoxy-2'-fluoronucleoside
  modified_base (21)..(21): 2'-O-methylnucleoside
acccugaaaagacuaucaccu

SEQ ID NO: 2886 - RNA, 21 nt, Artificial Sequence
  siRNA sense strand against MASP2
  modified_base (1)..(1): 2'-Deoxy-2'-fluoronucleoside
  modified_base (2)..(2): 2'-O-methylnucleoside
  modified_base (3)..(3): 2'-Deoxy-2'-fluoronucleoside
  modified_base (4)..(4): 2'-O-methylnucleoside
  modified_base (5)..(5): 2'-Deoxy-2'-fluoronucleoside
  modified_base (6)..(6): 2'-O-methylnucleoside
  modified_base (7)..(7): 2'-Deoxy-2'-fluoronucleoside
  modified_base (8)..(8): 2'-O-methylnucleoside
  modified_base (9)..(9): 2'-Deoxy-2'-fluoronucleoside
  modified_base (10)..(10): 2'-O-methylnucleoside
  modified_base (11)..(11): 2'-Deoxy-2'-fluoronucleoside
  modified_base (12)..(12): 2'-Deoxy-2'-fluoronucleoside
  modified_base (13)..(13): 2'-O-methylnucleoside
  modified_base (14)..(14): 2'-Deoxy-2'-fluoronucleoside
  modified_base (15)..(15): 2'-O-methylnucleoside
  modified_base (16)..(16): 2'-Deoxy-2'-fluoronucleoside
  modified_base (17)..(17): 2'-O-methylnucleoside
  modified_base (18)..(18): 2'-Deoxy-2'-fluoronucleoside
  modified_base (19)..(19): 2'-O-methylnucleoside
  modified_base (20)..(20): 2'-Deoxy-2'-fluoronucleoside
  modified_base (21)..(21): 2'-O-methylnucleoside
uauacucaugaugcuggcuuu

SEQ ID NO: 2887 - RNA, 21 nt, Artificial Sequence
  siRNA sense strand against MASP2
  modified_base (1)..(1): 2'-Deoxy-2'-fluoronucleoside
  modified_base (2)..(2): 2'-O-methylnucleoside
  modified_base (3)..(3): 2'-Deoxy-2'-fluoronucleoside
  modified_base (4)..(4): 2'-O-methylnucleoside
  modified_base (5)..(5): 2'-Deoxy-2'-fluoronucleoside
  modified_base (6)..(6): 2'-O-methylnucleoside
  modified_base (7)..(7): 2'-Deoxy-2'-fluoronucleoside
  modified_base (8)..(8): 2'-O-methylnucleoside
  modified_base (9)..(9): 2'-Deoxy-2'-fluoronucleoside
  modified_base (10)..(10): 2'-O-methylnucleoside
  modified_base (11)..(11): 2'-Deoxy-2'-fluoronucleoside
  modified_base (12)..(12): 2'-Deoxy-2'-fluoronucleoside
  modified_base (13)..(13): 2'-O-methylnucleoside
  modified_base (14)..(14): 2'-Deoxy-2'-fluoronucleoside
  modified_base (15)..(15): 2'-O-methylnucleoside
  modified_base (16)..(16): 2'-Deoxy-2'-fluoronucleoside
  modified_base (17)..(17): 2'-O-methylnucleoside
  modified_base (18)..(18): 2'-Deoxy-2'-fluoronucleoside
  modified_base (19)..(19): 2'-O-methylnucleoside
  modified_base (20)..(20): 2'-Deoxy-2'-fluoronucleoside
  modified_base (21)..(21): 2'-O-methylnucleoside
uacucaugaugcuggcuuuga

SEQ ID NO: 2888 - RNA, 21 nt, Artificial Sequence
  siRNA sense strand against MASP2
  modified_base (1)..(1): 2'-Deoxy-2'-fluoronucleoside
  modified_base (2)..(2): 2'-O-methylnucleoside
  modified_base (3)..(3): 2'-Deoxy-2'-fluoronucleoside
  modified_base (4)..(4): 2'-O-methylnucleoside
  modified_base (5)..(5): 2'-Deoxy-2'-fluoronucleoside
  modified_base (6)..(6): 2'-O-methylnucleoside
  modified_base (7)..(7): 2'-Deoxy-2'-fluoronucleoside
  modified_base (8)..(8): 2'-O-methylnucleoside
  modified_base (9)..(9): 2'-Deoxy-2'-fluoronucleoside
  modified_base (10)..(10): 2'-O-methylnucleoside
  modified_base (11)..(11): 2'-Deoxy-2'-fluoronucleoside
  modified_base (12)..(12): 2'-Deoxy-2'-fluoronucleoside
  modified_base (13)..(13): 2'-O-methylnucleoside
  modified_base (14)..(14): 2'-Deoxy-2'-fluoronucleoside
  modified_base (15)..(15): 2'-O-methylnucleoside
  modified_base (16)..(16): 2'-Deoxy-2'-fluoronucleoside
  modified_base (17)..(17): 2'-O-methylnucleoside
  modified_base (18)..(18): 2'-Deoxy-2'-fluoronucleoside
  modified_base (19)..(19): 2'-O-methylnucleoside
  modified_base (20)..(20): 2'-Deoxy-2'-fluoronucleoside
  modified_base (21)..(21): 2'-O-methylnucleoside
ucaugaugcuggcuuugacaa

SEQ ID NO: 2889 - RNA, 21 nt, Artificial Sequence
  siRNA sense strand against MASP2
  modified_base (1)..(1): 2'-Deoxy-2'-fluoronucleoside
  modified_base (2)..(2): 2'-O-methylnucleoside
  modified_base (3)..(3): 2'-Deoxy-2'-fluoronucleoside
  modified_base (4)..(4): 2'-O-methylnucleoside
  modified_base (5)..(5): 2'-Deoxy-2'-fluoronucleoside
  modified_base (6)..(6): 2'-O-methylnucleoside
  modified_base (7)..(7): 2'-Deoxy-2'-fluoronucleoside
  modified_base (8)..(8): 2'-O-methylnucleoside
  modified_base (9)..(9): 2'-Deoxy-2'-fluoronucleoside
  modified_base (10)..(10): 2'-O-methylnucleoside
  modified_base (11)..(11): 2'-Deoxy-2'-fluoronucleoside
  modified_base (12)..(12): 2'-Deoxy-2'-fluoronucleoside
  modified_base (13)..(13): 2'-O-methylnucleoside
  modified_base (14)..(14): 2'-Deoxy-2'-fluoronucleoside
  modified_base (15)..(15): 2'-O-methylnucleoside
  modified_base (16)..(16): 2'-Deoxy-2'-fluoronucleoside
  modified_base (17)..(17): 2'-O-methylnucleoside
  modified_base (18)..(18): 2'-Deoxy-2'-fluoronucleoside
  modified_base (19)..(19): 2'-O-methylnucleoside
  modified_base (20)..(20): 2'-Deoxy-2'-fluoronucleoside
  modified_base (21)..(21): 2'-O-methylnucleoside
augaugcuggcuuugacaaug

SEQ ID NO: 2890 - RNA, 21 nt, Artificial Sequence
  siRNA sense strand against MASP2
  modified_base (1)..(1): 2'-Deoxy-2'-fluoronucleoside
  modified_base (2)..(2): 2'-O-methylnucleoside
  modified_base (3)..(3): 2'-Deoxy-2'-fluoronucleoside
  modified_base (4)..(4): 2'-O-methylnucleoside
  modified_base (5)..(5): 2'-Deoxy-2'-fluoronucleoside
  modified_base (6)..(6): 2'-O-methylnucleoside
  modified_base (7)..(7): 2'-Deoxy-2'-fluoronucleoside
  modified_base (8)..(8): 2'-O-methylnucleoside
  modified_base (9)..(9): 2'-Deoxy-2'-fluoronucleoside
  modified_base (10)..(10): 2'-O-methylnucleoside
  modified_base (11)..(11): 2'-Deoxy-2'-fluoronucleoside
  modified_base (12)..(12): 2'-Deoxy-2'-fluoronucleoside
  modified_base (13)..(13): 2'-O-methylnucleoside
  modified_base (14)..(14): 2'-Deoxy-2'-fluoronucleoside
  modified_base (15)..(15): 2'-O-methylnucleoside
  modified_base (16)..(16): 2'-Deoxy-2'-fluoronucleoside
  modified_base (17)..(17): 2'-O-methylnucleoside
  modified_base (18)..(18): 2'-Deoxy-2'-fluoronucleoside
  modified_base (19)..(19): 2'-O-methylnucleoside
  modified_base (20)..(20): 2'-Deoxy-2'-fluoronucleoside
  modified_base (21)..(21): 2'-O-methylnucleoside
ugaugcuggcuuugacaauga

SEQ ID NO: 2891 - RNA, 21 nt, Artificial Sequence
  siRNA sense strand against MASP2
  modified_base (1)..(1): 2'-Deoxy-2'-fluoronucleoside
  modified_base (2)..(2): 2'-O-methylnucleoside
  modified_base (3)..(3): 2'-Deoxy-2'-fluoronucleoside
  modified_base (4)..(4): 2'-O-methylnucleoside
  modified_base (5)..(5): 2'-Deoxy-2'-fluoronucleoside
  modified_base (6)..(6): 2'-O-methylnucleoside
  modified_base (7)..(7): 2'-Deoxy-2'-fluoronucleoside
  modified_base (8)..(8): 2'-O-methylnucleoside
  modified_base (9)..(9): 2'-Deoxy-2'-fluoronucleoside
  modified_base (10)..(10): 2'-O-methylnucleoside
  modified_base (11)..(11): 2'-Deoxy-2'-fluoronucleoside
  modified_base (12)..(12): 2'-Deoxy-2'-fluoronucleoside
  modified_base (13)..(13): 2'-O-methylnucleoside
  modified_base (14)..(14): 2'-Deoxy-2'-fluoronucleoside
  modified_base (15)..(15): 2'-O-methylnucleoside
  modified_base (16)..(16): 2'-Deoxy-2'-fluoronucleoside
  modified_base (17)..(17): 2'-O-methylnucleoside
  modified_base (18)..(18): 2'-Deoxy-2'-fluoronucleoside
  modified_base (19)..(19): 2'-O-methylnucleoside
  modified_base (20)..(20): 2'-Deoxy-2'-fluoronucleoside
  modified_base (21)..(21): 2'-O-methylnucleoside
augcuggcuuugacaaugaca

SEQ ID NO: 2892 - RNA, 21 nt, Artificial Sequence
  siRNA sense strand against MASP2
  modified_base (1)..(1): 2'-Deoxy-2'-fluoronucleoside
  modified_base (2)..(2): 2'-O-methylnucleoside
  modified_base (3)..(3): 2'-Deoxy-2'-fluoronucleoside
  modified_base (4)..(4): 2'-O-methylnucleoside
  modified_base (5)..(5): 2'-Deoxy-2'-fluoronucleoside
  modified_base (6)..(6): 2'-O-methylnucleoside
  modified_base (7)..(7): 2'-Deoxy-2'-fluoronucleoside
  modified_base (8)..(8): 2'-O-methylnucleoside
  modified_base (9)..(9): 2'-Deoxy-2'-fluoronucleoside
  modified_base (10)..(10): 2'-O-methylnucleoside
  modified_base (11)..(11): 2'-Deoxy-2'-fluoronucleoside
  modified_base (12)..(12): 2'-Deoxy-2'-fluoronucleoside
  modified_base (13)..(13): 2'-O-methylnucleoside
  modified_base (14)..(14): 2'-Deoxy-2'-fluoronucleoside
  modified_base (15)..(15): 2'-O-methylnucleoside
  modified_base (16)..(16): 2'-Deoxy-2'-fluoronucleoside
  modified_base (17)..(17): 2'-O-methylnucleoside
  modified_base (18)..(18): 2'-Deoxy-2'-fluoronucleoside
  modified_base (19)..(19): 2'-O-methylnucleoside
  modified_base (20)..(20): 2'-Deoxy-2'-fluoronucleoside
  modified_base (21)..(21): 2'-O-methylnucleoside
ugcuggcuuugacaaugacau

SEQ ID NO: 2893 - RNA, 21 nt, Artificial Sequence
  siRNA sense strand against MASP2
  modified_base (1)..(1): 2'-Deoxy-2'-fluoronucleoside
  modified_base (2)..(2): 2'-O-methylnucleoside
  modified_base (3)..(3): 2'-Deoxy-2'-fluoronucleoside
  modified_base (4)..(4): 2'-O-methylnucleoside
  modified_base (5)..(5): 2'-Deoxy-2'-fluoronucleoside
  modified_base (6)..(6): 2'-O-methylnucleoside
  modified_base (7)..(7): 2'-Deoxy-2'-fluoronucleoside
  modified_base (8)..(8): 2'-O-methylnucleoside
  modified_base (9)..(9): 2'-Deoxy-2'-fluoronucleoside
  modified_base (10)..(10): 2'-O-methylnucleoside
  modified_base (11)..(11): 2'-Deoxy-2'-fluoronucleoside
  modified_base (12)..(12): 2'-Deoxy-2'-fluoronucleoside
  modified_base (13)..(13): 2'-O-methylnucleoside
  modified_base (14)..(14): 2'-Deoxy-2'-fluoronucleoside
  modified_base (15)..(15): 2'-O-methylnucleoside
  modified_base (16)..(16): 2'-Deoxy-2'-fluoronucleoside
  modified_base (17)..(17): 2'-O-methylnucleoside
  modified_base (18)..(18): 2'-Deoxy-2'-fluoronucleoside
  modified_base (19)..(19): 2'-O-methylnucleoside
  modified_base (20)..(20): 2'-Deoxy-2'-fluoronucleoside
  modified_base (21)..(21): 2'-O-methylnucleoside
gcuggcuuugacaaugacaua

SEQ ID NO: 2894 - RNA, 21 nt, Artificial Sequence
  siRNA sense strand against MASP2
  modified_base (1)..(1): 2'-Deoxy-2'-fluoronucleoside
  modified_base (2)..(2): 2'-O-methylnucleoside
  modified_base (3)..(3): 2'-Deoxy-2'-fluoronucleoside
  modified_base (4)..(4): 2'-O-methylnucleoside
  modified_base (5)..(5): 2'-Deoxy-2'-fluoronucleoside
  modified_base (6)..(6): 2'-O-methylnucleoside
  modified_base (7)..(7): 2'-Deoxy-2'-fluoronucleoside
  modified_base (8)..(8): 2'-O-methylnucleoside
  modified_base (9)..(9): 2'-Deoxy-2'-fluoronucleoside
  modified_base (10)..(10): 2'-O-methylnucleoside
  modified_base (11)..(11): 2'-Deoxy-2'-fluoronucleoside
  modified_base (12)..(12): 2'-Deoxy-2'-fluoronucleoside
  modified_base (13)..(13): 2'-O-methylnucleoside
  modified_base (14)..(14): 2'-Deoxy-2'-fluoronucleoside
  modified_base (15)..(15): 2'-O-methylnucleoside
  modified_base (16)..(16): 2'-Deoxy-2'-fluoronucleoside
  modified_base (17)..(17): 2'-O-methylnucleoside
  modified_base (18)..(18): 2'-Deoxy-2'-fluoronucleoside
  modified_base (19)..(19): 2'-O-methylnucleoside
  modified_base (20)..(20): 2'-Deoxy-2'-fluoronucleoside
  modified_base (21)..(21): 2'-O-methylnucleoside
ggcuuugacaaugacauagca

SEQ ID NO: 2895 - RNA, 21 nt, Artificial Sequence
  siRNA sense strand against MASP2
  modified_base (1)..(1): 2'-Deoxy-2'-fluoronucleoside
  modified_base (2)..(2): 2'-O-methylnucleoside
  modified_base (3)..(3): 2'-Deoxy-2'-fluoronucleoside
  modified_base (4)..(4): 2'-O-methylnucleoside
  modified_base (5)..(5): 2'-Deoxy-2'-fluoronucleoside
  modified_base (6)..(6): 2'-O-methylnucleoside
  modified_base (7)..(7): 2'-Deoxy-2'-fluoronucleoside
  modified_base (8)..(8): 2'-O-methylnucleoside
  modified_base (9)..(9): 2'-Deoxy-2'-fluoronucleoside
  modified_base (10)..(10): 2'-O-methylnucleoside
  modified_base (11)..(11): 2'-Deoxy-2'-fluoronucleoside
  modified_base (12)..(12): 2'-Deoxy-2'-fluoronucleoside
  modified_base (13)..(13): 2'-O-methylnucleoside
  modified_base (14)..(14): 2'-Deoxy-2'-fluoronucleoside
  modified_base (15)..(15): 2'-O-methylnucleoside
  modified_base (16)..(16): 2'-Deoxy-2'-fluoronucleoside
  modified_base (17)..(17): 2'-O-methylnucleoside
  modified_base (18)..(18): 2'-Deoxy-2'-fluoronucleoside
  modified_base (19)..(19): 2'-O-methylnucleoside
  modified_base (20)..(20): 2'-Deoxy-2'-fluoronucleoside
  modified_base (21)..(21): 2'-O-methylnucleoside
uugacaaugacauagcacuga

SEQ ID NO: 2896 - RNA, 21 nt, Artificial Sequence
  siRNA sense strand against MASP2
  modified_base (1)..(1): 2'-Deoxy-2'-fluoronucleoside
  modified_base (2)..(2): 2'-O-methylnucleoside
  modified_base (3)..(3): 2'-Deoxy-2'-fluoronucleoside
  modified_base (4)..(4): 2'-O-methylnucleoside
  modified_base (5)..(5): 2'-Deoxy-2'-fluoronucleoside
  modified_base (6)..(6): 2'-O-methylnucleoside
  modified_base (7)..(7): 2'-Deoxy-2'-fluoronucleoside
  modified_base (8)..(8): 2'-O-methylnucleoside
  modified_base (9)..(9): 2'-Deoxy-2'-fluoronucleoside
  modified_base (10)..(10): 2'-O-methylnucleoside
  modified_base (11)..(11): 2'-Deoxy-2'-fluoronucleoside
  modified_base (12)..(12): 2'-Deoxy-2'-fluoronucleoside
  modified_base (13)..(13): 2'-O-methylnucleoside
  modified_base (14)..(14): 2'-Deoxy-2'-fluoronucleoside
  modified_base (15)..(15): 2'-O-methylnucleoside
  modified_base (16)..(16): 2'-Deoxy-2'-fluoronucleoside
  modified_base (17)..(17): 2'-O-methylnucleoside
  modified_base (18)..(18): 2'-Deoxy-2'-fluoronucleoside
  modified_base (19)..(19): 2'-O-methylnucleoside
  modified_base (20)..(20): 2'-Deoxy-2'-fluoronucleoside
  modified_base (21)..(21): 2'-O-methylnucleoside
augacauagcacugauuaaau

SEQ ID NO: 2897 - RNA, 21 nt, Artificial Sequence
  siRNA sense strand against MASP2
  modified_base (1)..(1): 2'-Deoxy-2'-fluoronucleoside
  modified_base (2)..(2): 2'-O-methylnucleoside
  modified_base (3)..(3): 2'-Deoxy-2'-fluoronucleoside
  modified_base (4)..(4): 2'-O-methylnucleoside
  modified_base (5)..(5): 2'-Deoxy-2'-fluoronucleoside
  modified_base (6)..(6): 2'-O-methylnucleoside
  modified_base (7)..(7): 2'-Deoxy-2'-fluoronucleoside
  modified_base (8)..(8): 2'-O-methylnucleoside
  modified_base (9)..(9): 2'-Deoxy-2'-fluoronucleoside
  modified_base (10)..(10): 2'-O-methylnucleoside
  modified_base (11)..(11): 2'-Deoxy-2'-fluoronucleoside
  modified_base (12)..(12): 2'-Deoxy-2'-fluoronucleoside
  modified_base (13)..(13): 2'-O-methylnucleoside
  modified_base (14)..(14): 2'-Deoxy-2'-fluoronucleoside
  modified_base (15)..(15): 2'-O-methylnucleoside
  modified_base (16)..(16): 2'-Deoxy-2'-fluoronucleoside
  modified_base (17)..(17): 2'-O-methylnucleoside
  modified_base (18)..(18): 2'-Deoxy-2'-fluoronucleoside
  modified_base (19)..(19): 2'-O-methylnucleoside
  modified_base (20)..(20): 2'-Deoxy-2'-fluoronucleoside
  modified_base (21)..(21): 2'-O-methylnucleoside
auagcacugauuaaauugaau

SEQ ID NO: 2898 - RNA, 21 nt, Artificial Sequence
  siRNA sense strand against MASP2
  modified_base (1)..(1): 2'-Deoxy-2'-fluoronucleoside
  modified_base (2)..(2): 2'-O-methylnucleoside
  modified_base (3)..(3): 2'-Deoxy-2'-fluoronucleoside
  modified_base (4)..(4): 2'-O-methylnucleoside
  modified_base (5)..(5): 2'-Deoxy-2'-fluoronucleoside
  modified_base (6)..(6): 2'-O-methylnucleoside
  modified_base (7)..(7): 2'-Deoxy-2'-fluoronucleoside
  modified_base (8)..(8): 2'-O-methylnucleoside
  modified_base (9)..(9): 2'-Deoxy-2'-fluoronucleoside
  modified_base (10)..(10): 2'-O-methylnucleoside
  modified_base (11)..(11): 2'-Deoxy-2'-fluoronucleoside
  modified_base (12)..(12): 2'-Deoxy-2'-fluoronucleoside
  modified_base (13)..(13): 2'-O-methylnucleoside
  modified_base (14)..(14): 2'-Deoxy-2'-fluoronucleoside
  modified_base (15)..(15): 2'-O-methylnucleoside
  modified_base (16)..(16): 2'-Deoxy-2'-fluoronucleoside
  modified_base (17)..(17): 2'-O-methylnucleoside
  modified_base (18)..(18): 2'-Deoxy-2'-fluoronucleoside
  modified_base (19)..(19): 2'-O-methylnucleoside
  modified_base (20)..(20): 2'-Deoxy-2'-fluoronucleoside
  modified_base (21)..(21): 2'-O-methylnucleoside
aauaacaaaguuguaaucaau

SEQ ID NO: 2899 - RNA, 21 nt, Artificial Sequence
  siRNA sense strand against MASP2
  modified_base (1)..(1): 2'-Deoxy-2'-fluoronucleoside
  modified_base (2)..(2): 2'-O-methylnucleoside
  modified_base (3)..(3): 2'-Deoxy-2'-fluoronucleoside
  modified_base (4)..(4): 2'-O-methylnucleoside
  modified_base (5)..(5): 2'-Deoxy-2'-fluoronucleoside
  modified_base (6)..(6): 2'-O-methylnucleoside
  modified_base (7)..(7): 2'-Deoxy-2'-fluoronucleoside
  modified_base (8)..(8): 2'-O-methylnucleoside
  modified_base (9)..(9): 2'-Deoxy-2'-fluoronucleoside
  modified_base (10)..(10): 2'-O-methylnucleoside
  modified_base (11)..(11): 2'-Deoxy-2'-fluoronucleoside
  modified_base (12)..(12): 2'-Deoxy-2'-fluoronucleoside
  modified_base (13)..(13): 2'-O-methylnucleoside
  modified_base (14)..(14): 2'-Deoxy-2'-fluoronucleoside
  modified_base (15)..(15): 2'-O-methylnucleoside
  modified_base (16)..(16): 2'-Deoxy-2'-fluoronucleoside
  modified_base (17)..(17): 2'-O-methylnucleoside
  modified_base (18)..(18): 2'-Deoxy-2'-fluoronucleoside
  modified_base (19)..(19): 2'-O-methylnucleoside
  modified_base (20)..(20): 2'-Deoxy-2'-fluoronucleoside
  modified_base (21)..(21): 2'-O-methylnucleoside
aaguuguaaucaauagcaaca

SEQ ID NO: 2900 - RNA, 23 nt, Artificial Sequence
  siRNA antisense strand against MASP2
  modified_base (1)..(1): 2'-Deoxy-2'-fluoronucleoside
  modified_base (2)..(2): 2'-O-methylnucleoside
  modified_base (3)..(3): 2'-Deoxy-2'-fluoronucleoside
  modified_base (4)..(4): 2'-O-methylnucleoside
  modified_base (5)..(5): 2'-Deoxy-2'-fluoronucleoside
  modified_base (6)..(6): 2'-O-methylnucleoside
  modified_base (7)..(7): 2'-Deoxy-2'-fluoronucleoside
  modified_base (8)..(8): 2'-O-methylnucleoside
  modified_base (9)..(9): 2'-Deoxy-2'-fluoronucleoside
  modified_base (10)..(10): 2'-O-methylnucleoside
  modified_base (11)..(11): 2'-O-methylnucleoside
  modified_base (12)..(12): 2'-Deoxy-2'-fluoronucleoside
  modified_base (13)..(13): 2'-O-methylnucleoside
  modified_base (14)..(14): 2'-Deoxy-2'-fluoronucleoside
  modified_base (15)..(15): 2'-O-methylnucleoside
  modified_base (16)..(16): 2'-Deoxy-2'-fluoronucleoside
  modified_base (17)..(17): 2'-O-methylnucleoside
  modified_base (18)..(18): 2'-Deoxy-2'-fluoronucleoside
  modified_base (19)..(19): 2'-O-methylnucleoside
  modified_base (20)..(20): 2'-Deoxy-2'-fluoronucleoside
  modified_base (21)..(21): 2'-O-methylnucleoside
  modified_base (22)..(22): 2'-Deoxy-2'-fluoronucleoside
  modified_base (23)..(23): 2'-O-methylnucleoside
guucaggccacuucgggcccaag

SEQ ID NO: 2901 - RNA, 23 nt, Artificial Sequence
  siRNA antisense strand against MASP2
  modified_base (1)..(1): 2'-Deoxy-2'-fluoronucleoside
  modified_base (2)..(2): 2'-O-methylnucleoside
  modified_base (3)..(3): 2'-Deoxy-2'-fluoronucleoside
  modified_base (4)..(4): 2'-O-methylnucleoside
  modified_base (5)..(5): 2'-Deoxy-2'-fluoronucleoside
  modified_base (6)..(6): 2'-O-methylnucleoside
  modified_base (7)..(7): 2'-Deoxy-2'-fluoronucleoside
  modified_base (8)..(8): 2'-O-methylnucleoside
  modified_base (9)..(9): 2'-Deoxy-2'-fluoronucleoside
  modified_base (10)..(10): 2'-O-methylnucleoside
  modified_base (11)..(11): 2'-O-methylnucleoside
  modified_base (12)..(12): 2'-Deoxy-2'-fluoronucleoside
  modified_base (13)..(13): 2'-O-methylnucleoside
  modified_base (14)..(14): 2'-Deoxy-2'-fluoronucleoside
  modified_base (15)..(15): 2'-O-methylnucleoside
  modified_base (16)..(16): 2'-Deoxy-2'-fluoronucleoside
  modified_base (17)..(17): 2'-O-methylnucleoside
  modified_base (18)..(18): 2'-Deoxy-2'-fluoronucleoside
  modified_base (19)..(19): 2'-O-methylnucleoside
  modified_base (20)..(20): 2'-Deoxy-2'-fluoronucleoside
  modified_base (21)..(21): 2'-O-methylnucleoside
  modified_base (22)..(22): 2'-Deoxy-2'-fluoronucleoside
  modified_base (23)..(23): 2'-O-methylnucleoside
acagguucaggccacuucgggcc

SEQ ID NO: 2902 - RNA, 23 nt, Artificial Sequence
  siRNA antisense strand against MASP2
  modified_base (1)..(1): 2'-Deoxy-2'-fluoronucleoside
  modified_base (2)..(2): 2'-O-methylnucleoside
  modified_base (3)..(3): 2'-Deoxy-2'-fluoronucleoside
  modified_base (4)..(4): 2'-O-methylnucleoside
  modified_base (5)..(5): 2'-Deoxy-2'-fluoronucleoside
  modified_base (6)..(6): 2'-O-methylnucleoside
  modified_base (7)..(7): 2'-Deoxy-2'-fluoronucleoside
  modified_base (8)..(8): 2'-O-methylnucleoside
  modified_base (9)..(9): 2'-Deoxy-2'-fluoronucleoside
  modified_base (10)..(10): 2'-O-methylnucleoside
  modified_base (11)..(11): 2'-O-methylnucleoside
  modified_base (12)..(12): 2'-Deoxy-2'-fluoronucleoside
  modified_base (13)..(13): 2'-O-methylnucleoside
  modified_base (14)..(14): 2'-Deoxy-2'-fluoronucleoside
  modified_base (15)..(15): 2'-O-methylnucleoside
  modified_base (16)..(16): 2'-Deoxy-2'-fluoronucleoside
  modified_base (17)..(17): 2'-O-methylnucleoside
  modified_base (18)..(18): 2'-Deoxy-2'-fluoronucleoside
  modified_base (19)..(19): 2'-O-methylnucleoside
  modified_base (20)..(20): 2'-Deoxy-2'-fluoronucleoside
  modified_base (21)..(21): 2'-O-methylnucleoside
  modified_base (22)..(22): 2'-Deoxy-2'-fluoronucleoside
  modified_base (23)..(23): 2'-O-methylnucleoside
ucaggguccagcgccgcuccugg

SEQ ID NO: 2903 - RNA, 23 nt, Artificial Sequence
  siRNA antisense strand against MASP2
  modified_base (1)..(1): 2'-Deoxy-2'-fluoronucleoside
  modified_base (2)..(2): 2'-O-methylnucleoside
  modified_base (3)..(3): 2'-Deoxy-2'-fluoronucleoside
  modified_base (4)..(4): 2'-O-methylnucleoside
  modified_base (5)..(5): 2'-Deoxy-2'-fluoronucleoside
  modified_base (6)..(6): 2'-O-methylnucleoside
  modified_base (7)..(7): 2'-Deoxy-2'-fluoronucleoside
  modified_base (8)..(8): 2'-O-methylnucleoside
  modified_base (9)..(9): 2'-Deoxy-2'-fluoronucleoside
  modified_base (10)..(10): 2'-O-methylnucleoside
  modified_base (11)..(11): 2'-O-methylnucleoside
  modified_base (12)..(12): 2'-Deoxy-2'-fluoronucleoside
  modified_base (13)..(13): 2'-O-methylnucleoside
  modified_base (14)..(14): 2'-Deoxy-2'-fluoronucleoside
  modified_base (15)..(15): 2'-O-methylnucleoside
  modified_base (16)..(16): 2'-Deoxy-2'-fluoronucleoside
  modified_base (17)..(17): 2'-O-methylnucleoside
  modified_base (18)..(18): 2'-Deoxy-2'-fluoronucleoside
  modified_base (19)..(19): 2'-O-methylnucleoside
  modified_base (20)..(20): 2'-Deoxy-2'-fluoronucleoside
  modified_base (21)..(21): 2'-O-methylnucleoside
  modified_base (22)..(22): 2'-Deoxy-2'-fluoronucleoside
  modified_base (23)..(23): 2'-O-methylnucleoside
ugaaguagaggcgcaggcgguag

SEQ ID NO: 2904 - RNA, 23 nt, Artificial Sequence
  siRNA antisense strand against MASP2
  modified_base (1)..(1): 2'-Deoxy-2'-fluoronucleoside
  modified_base (2)..(2): 2'-O-methylnucleoside
  modified_base (3)..(3): 2'-Deoxy-2'-fluoronucleoside
  modified_base (4)..(4): 2'-O-methylnucleoside
  modified_base (5)..(5): 2'-Deoxy-2'-fluoronucleoside
  modified_base (6)..(6): 2'-O-methylnucleoside
  modified_base (7)..(7): 2'-Deoxy-2'-fluoronucleoside
  modified_base (8)..(8): 2'-O-methylnucleoside
  modified_base (9)..(9): 2'-Deoxy-2'-fluoronucleoside
  modified_base (10)..(10): 2'-O-methylnucleoside
  modified_base (11)..(11): 2'-O-methylnucleoside
  modified_base (12)..(12): 2'-Deoxy-2'-fluoronucleoside
  modified_base (13)..(13): 2'-O-methylnucleoside
  modified_base (14)..(14): 2'-Deoxy-2'-fluoronucleoside
  modified_base (15)..(15): 2'-O-methylnucleoside
  modified_base (16)..(16): 2'-Deoxy-2'-fluoronucleoside
  modified_base (17)..(17): 2'-O-methylnucleoside
  modified_base (18)..(18): 2'-Deoxy-2'-fluoronucleoside
  modified_base (19)..(19): 2'-O-methylnucleoside
  modified_base (20)..(20): 2'-Deoxy-2'-fluoronucleoside
  modified_base (21)..(21): 2'-O-methylnucleoside
  modified_base (22)..(22): 2'-Deoxy-2'-fluoronucleoside
  modified_base (23)..(23): 2'-O-methylnucleoside
gugaaguagaggcgcaggcggua

SEQ ID NO: 2905 - RNA, 23 nt, Artificial Sequence
  siRNA antisense strand against MASP2
  modified_base (1)..(1): 2'-Deoxy-2'-fluoronucleoside
  modified_base (2)..(2): 2'-O-methylnucleoside
  modified_base (3)..(3): 2'-Deoxy-2'-fluoronucleoside
  modified_base (4)..(4): 2'-O-methylnucleoside
  modified_base (5)..(5): 2'-Deoxy-2'-fluoronucleoside
  modified_base (6)..(6): 2'-O-methylnucleoside
  modified_base (7)..(7): 2'-Deoxy-2'-fluoronucleoside
  modified_base (8)..(8): 2'-O-methylnucleoside
  modified_base (9)..(9): 2'-Deoxy-2'-fluoronucleoside
  modified_base (10)..(10): 2'-O-methylnucleoside
  modified_base (11)..(11): 2'-O-methylnucleoside
  modified_base (12)..(12): 2'-Deoxy-2'-fluoronucleoside
  modified_base (13)..(13): 2'-O-methylnucleoside
  modified_base (14)..(14): 2'-Deoxy-2'-fluoronucleoside
  modified_base (15)..(15): 2'-O-methylnucleoside
  modified_base (16)..(16): 2'-Deoxy-2'-fluoronucleoside
  modified_base (17)..(17): 2'-O-methylnucleoside
  modified_base (18)..(18): 2'-Deoxy-2'-fluoronucleoside
  modified_base (19)..(19): 2'-O-methylnucleoside
  modified_base (20)..(20): 2'-Deoxy-2'-fluoronucleoside
  modified_base (21)..(21): 2'-O-methylnucleoside
  modified_base (22)..(22): 2'-Deoxy-2'-fluoronucleoside
  modified_base (23)..(23): 2'-O-methylnucleoside
ggugaaguagaggcgcaggcggu

SEQ ID NO: 2906 - RNA, 23 nt, Artificial Sequence
  siRNA antisense strand against MASP2
  modified_base (1)..(1): 2'-Deoxy-2'-fluoronucleoside
  modified_base (2)..(2): 2'-O-methylnucleoside
  modified_base (3)..(3): 2'-Deoxy-2'-fluoronucleoside
  modified_base (4)..(4): 2'-O-methylnucleoside
  modified_base (5)..(5): 2'-Deoxy-2'-fluoronucleoside
  modified_base (6)..(6): 2'-O-methylnucleoside
  modified_base (7)..(7): 2'-Deoxy-2'-fluoronucleoside
  modified_base (8)..(8): 2'-O-methylnucleoside
  modified_base (9)..(9): 2'-Deoxy-2'-fluoronucleoside
  modified_base (10)..(10): 2'-O-methylnucleoside
  modified_base (11)..(11): 2'-O-methylnucleoside
  modified_base (12)..(12): 2'-Deoxy-2'-fluoronucleoside
  modified_base (13)..(13): 2'-O-methylnucleoside
  modified_base (14)..(14): 2'-Deoxy-2'-fluoronucleoside
  modified_base (15)..(15): 2'-O-methylnucleoside
  modified_base (16)..(16): 2'-Deoxy-2'-fluoronucleoside
  modified_base (17)..(17): 2'-O-methylnucleoside
  modified_base (18)..(18): 2'-Deoxy-2'-fluoronucleoside
  modified_base (19)..(19): 2'-O-methylnucleoside
  modified_base (20)..(20): 2'-Deoxy-2'-fluoronucleoside
  modified_base (21)..(21): 2'-O-methylnucleoside
  modified_base (22)..(22): 2'-Deoxy-2'-fluoronucleoside
  modified_base (23)..(23): 2'-O-methylnucleoside
ucgaagugggugaaguagaggcg

SEQ ID NO: 2907 - RNA, 23 nt, Artificial Sequence
  siRNA antisense strand against MASP2
  modified_base (1)..(1): 2'-Deoxy-2'-fluoronucleoside
  modified_base (2)..(2): 2'-O-methylnucleoside
  modified_base (3)..(3): 2'-Deoxy-2'-fluoronucleoside
  modified_base (4)..(4): 2'-O-methylnucleoside
  modified_base (5)..(5): 2'-Deoxy-2'-fluoronucleoside
  modified_base (6)..(6): 2'-O-methylnucleoside
  modified_base (7)..(7): 2'-Deoxy-2'-fluoronucleoside
  modified_base (8)..(8): 2'-O-methylnucleoside
  modified_base (9)..(9): 2'-Deoxy-2'-fluoronucleoside
  modified_base (10)..(10): 2'-O-methylnucleoside
  modified_base (11)..(11): 2'-O-methylnucleoside
  modified_base (12)..(12): 2'-Deoxy-2'-fluoronucleoside
  modified_base (13)..(13): 2'-O-methylnucleoside
  modified_base (14)..(14): 2'-Deoxy-2'-fluoronucleoside
  modified_base (15)..(15): 2'-O-methylnucleoside
  modified_base (16)..(16): 2'-Deoxy-2'-fluoronucleoside
  modified_base (17)..(17): 2'-O-methylnucleoside
  modified_base (18)..(18): 2'-Deoxy-2'-fluoronucleoside
  modified_base (19)..(19): 2'-O-methylnucleoside
  modified_base (20)..(20): 2'-Deoxy-2'-fluoronucleoside
  modified_base (21)..(21): 2'-O-methylnucleoside
  modified_base (22)..(22): 2'-Deoxy-2'-fluoronucleoside
  modified_base (23)..(23): 2'-O-methylnucleoside
gucgaagugggugaaguagaggc

SEQ ID NO: 2908 - RNA, 23 nt, Artificial Sequence
  siRNA antisense strand against MASP2
  modified_base (1)..(1): 2'-Deoxy-2'-fluoronucleoside
  modified_base (2)..(2): 2'-O-methylnucleoside
  modified_base (3)..(3): 2'-Deoxy-2'-fluoronucleoside
  modified_base (4)..(4): 2'-O-methylnucleoside
  modified_base (5)..(5): 2'-Deoxy-2'-fluoronucleoside
  modified_base (6)..(6): 2'-O-methylnucleoside
  modified_base (7)..(7): 2'-Deoxy-2'-fluoronucleoside
  modified_base (8)..(8): 2'-O-methylnucleoside
  modified_base (9)..(9): 2'-Deoxy-2'-fluoronucleoside
  modified_base (10)..(10): 2'-O-methylnucleoside
  modified_base (11)..(11): 2'-O-methylnucleoside
  modified_base (12)..(12): 2'-Deoxy-2'-fluoronucleoside
  modified_base (13)..(13): 2'-O-methylnucleoside
  modified_base (14)..(14): 2'-Deoxy-2'-fluoronucleoside
  modified_base (15)..(15): 2'-O-methylnucleoside
  modified_base (16)..(16): 2'-Deoxy-2'-fluoronucleoside
  modified_base (17)..(17): 2'-O-methylnucleoside
  modified_base (18)..(18): 2'-Deoxy-2'-fluoronucleoside
  modified_base (19)..(19): 2'-O-methylnucleoside
  modified_base (20)..(20): 2'-Deoxy-2'-fluoronucleoside
  modified_base (21)..(21): 2'-O-methylnucleoside
  modified_base (22)..(22): 2'-Deoxy-2'-fluoronucleoside
  modified_base (23)..(23): 2'-O-methylnucleoside
uugacgaagucguacucgcagag

SEQ ID NO: 2909 - RNA, 23 nt, Artificial Sequence
  siRNA antisense strand against MASP2
  modified_base (1)..(1): 2'-Deoxy-2'-fluoronucleoside
  modified_base (2)..(2): 2'-O-methylnucleoside
  modified_base (3)..(3): 2'-Deoxy-2'-fluoronucleoside
  modified_base (4)..(4): 2'-O-methylnucleoside
  modified_base (5)..(5): 2'-Deoxy-2'-fluoronucleoside
  modified_base (6)..(6): 2'-O-methylnucleoside
  modified_base (7)..(7): 2'-Deoxy-2'-fluoronucleoside
  modified_base (8)..(8): 2'-O-methylnucleoside
  modified_base (9)..(9): 2'-Deoxy-2'-fluoronucleoside
  modified_base (10)..(10): 2'-O-methylnucleoside
  modified_base (11)..(11): 2'-O-methylnucleoside
  modified_base (12)..(12): 2'-Deoxy-2'-fluoronucleoside
  modified_base (13)..(13): 2'-O-methylnucleoside
  modified_base (14)..(14): 2'-Deoxy-2'-fluoronucleoside
  modified_base (15)..(15): 2'-O-methylnucleoside
  modified_base (16)..(16): 2'-Deoxy-2'-fluoronucleoside
  modified_base (17)..(17): 2'-O-methylnucleoside
  modified_base (18)..(18): 2'-Deoxy-2'-fluoronucleoside
  modified_base (19)..(19): 2'-O-methylnucleoside
  modified_base (20)..(20): 2'-Deoxy-2'-fluoronucleoside
  modified_base (21)..(21): 2'-O-methylnucleoside
  modified_base (22)..(22): 2'-Deoxy-2'-fluoronucleoside
  modified_base (23)..(23): 2'-O-methylnucleoside
agcccagcgaguagaaagugucc

SEQ ID NO: 2910 - RNA, 23 nt, Artificial Sequence
  siRNA antisense strand against MASP2
  modified_base (1)..(1): 2'-Deoxy-2'-fluoronucleoside
  modified_base (2)..(2): 2'-O-methylnucleoside
  modified_base (3)..(3): 2'-Deoxy-2'-fluoronucleoside
  modified_base (4)..(4): 2'-O-methylnucleoside
  modified_base (5)..(5): 2'-Deoxy-2'-fluoronucleoside
  modified_base (6)..(6): 2'-O-methylnucleoside
  modified_base (7)..(7): 2'-Deoxy-2'-fluoronucleoside
  modified_base (8)..(8): 2'-O-methylnucleoside
  modified_base (9)..(9): 2'-Deoxy-2'-fluoronucleoside
  modified_base (10)..(10): 2'-O-methylnucleoside
  modified_base (11)..(11): 2'-O-methylnucleoside
  modified_base (12)..(12): 2'-Deoxy-2'-fluoronucleoside
  modified_base (13)..(13): 2'-O-methylnucleoside
  modified_base (14)..(14): 2'-Deoxy-2'-fluoronucleoside
  modified_base (15)..(15): 2'-O-methylnucleoside
  modified_base (16)..(16): 2'-Deoxy-2'-fluoronucleoside
  modified_base (17)..(17): 2'-O-methylnucleoside
  modified_base (18)..(18): 2'-Deoxy-2'-fluoronucleoside
  modified_base (19)..(19): 2'-O-methylnucleoside
  modified_base (20)..(20): 2'-Deoxy-2'-fluoronucleoside
  modified_base (21)..(21): 2'-O-methylnucleoside
  modified_base (22)..(22): 2'-Deoxy-2'-fluoronucleoside
  modified_base (23)..(23): 2'-O-methylnucleoside
guaauguccaggcuggagcccag

SEQ ID NO: 2911 - RNA, 23 nt, Artificial Sequence
  siRNA antisense strand against MASP2
  modified_base (1)..(1): 2'-Deoxy-2'-fluoronucleoside
  modified_base (2)..(2): 2'-O-methylnucleoside
  modified_base (3)..(3): 2'-Deoxy-2'-fluoronucleoside
  modified_base (4)..(4): 2'-O-methylnucleoside
  modified_base (5)..(5): 2'-Deoxy-2'-fluoronucleoside
  modified_base (6)..(6): 2'-O-methylnucleoside
  modified_base (7)..(7): 2'-Deoxy-2'-fluoronucleoside
  modified_base (8)..(8): 2'-O-methylnucleoside
  modified_base (9)..(9): 2'-Deoxy-2'-fluoronucleoside
  modified_base (10)..(10): 2'-O-methylnucleoside
  modified_base (11)..(11): 2'-O-methylnucleoside
  modified_base (12)..(12): 2'-Deoxy-2'-fluoronucleoside
  modified_base (13)..(13): 2'-O-methylnucleoside
  modified_base (14)..(14): 2'-Deoxy-2'-fluoronucleoside
  modified_base (15)..(15): 2'-O-methylnucleoside
  modified_base (16)..(16): 2'-Deoxy-2'-fluoronucleoside
  modified_base (17)..(17): 2'-O-methylnucleoside
  modified_base (18)..(18): 2'-Deoxy-2'-fluoronucleoside
  modified_base (19)..(19): 2'-O-methylnucleoside
  modified_base (20)..(20): 2'-Deoxy-2'-fluoronucleoside
  modified_base (21)..(21): 2'-O-methylnucleoside
  modified_base (22)..(22): 2'-Deoxy-2'-fluoronucleoside
  modified_base (23)..(23): 2'-O-methylnucleoside
agcggaagguaauguccaggcug

SEQ ID NO: 2912 - RNA, 23 nt, Artificial Sequence
  siRNA antisense strand against MASP2
  modified_base (1)..(1): 2'-Deoxy-2'-fluoronucleoside
  modified_base (2)..(2): 2'-O-methylnucleoside
  modified_base (3)..(3): 2'-Deoxy-2'-fluoronucleoside
  modified_base (4)..(4): 2'-O-methylnucleoside
  modified_base (5)..(5): 2'-Deoxy-2'-fluoronucleoside
  modified_base (6)..(6): 2'-O-methylnucleoside
  modified_base (7)..(7): 2'-Deoxy-2'-fluoronucleoside
  modified_base (8)..(8): 2'-O-methylnucleoside
  modified_base (9)..(9): 2'-Deoxy-2'-fluoronucleoside
  modified_base (10)..(10): 2'-O-methylnucleoside
  modified_base (11)..(11): 2'-O-methylnucleoside
  modified_base (12)..(12): 2'-Deoxy-2'-fluoronucleoside
  modified_base (13)..(13): 2'-O-methylnucleoside
  modified_base (14)..(14): 2'-Deoxy-2'-fluoronucleoside
  modified_base (15)..(15): 2'-O-methylnucleoside
  modified_base (16)..(16): 2'-Deoxy-2'-fluoronucleoside
  modified_base (17)..(17): 2'-O-methylnucleoside
  modified_base (18)..(18): 2'-Deoxy-2'-fluoronucleoside
  modified_base (19)..(19): 2'-O-methylnucleoside
  modified_base (20)..(20): 2'-Deoxy-2'-fluoronucleoside
  modified_base (21)..(21): 2'-O-methylnucleoside
  modified_base (22)..(22): 2'-Deoxy-2'-fluoronucleoside
  modified_base (23)..(23): 2'-O-methylnucleoside
ugcauagaaggccucgaaccccg

SEQ ID NO: 2913 - RNA, 23 nt, Artificial Sequence
  siRNA antisense strand against MASP2
  modified_base (1)..(1): 2'-Deoxy-2'-fluoronucleoside
  modified_base (2)..(2): 2'-O-methylnucleoside
  modified_base (3)..(3): 2'-Deoxy-2'-fluoronucleoside
  modified_base (4)..(4): 2'-O-methylnucleoside
  modified_base (5)..(5): 2'-Deoxy-2'-fluoronucleoside
  modified_base (6)..(6): 2'-O-methylnucleoside
  modified_base (7)..(7): 2'-Deoxy-2'-fluoronucleoside
  modified_base (8)..(8): 2'-O-methylnucleoside
  modified_base (9)..(9): 2'-Deoxy-2'-fluoronucleoside
  modified_base (10)..(10): 2'-O-methylnucleoside
  modified_base (11)..(11): 2'-O-methylnucleoside
  modified_base (12)..(12): 2'-Deoxy-2'-fluoronucleoside
  modified_base (13)..(13): 2'-O-methylnucleoside
  modified_base (14)..(14): 2'-Deoxy-2'-fluoronucleoside
  modified_base (15)..(15): 2'-O-methylnucleoside
  modified_base (16)..(16): 2'-Deoxy-2'-fluoronucleoside
  modified_base (17)..(17): 2'-O-methylnucleoside
  modified_base (18)..(18): 2'-Deoxy-2'-fluoronucleoside
  modified_base (19)..(19): 2'-O-methylnucleoside
  modified_base (20)..(20): 2'-Deoxy-2'-fluoronucleoside
  modified_base (21)..(21): 2'-O-methylnucleoside
  modified_base (22)..(22): 2'-Deoxy-2'-fluoronucleoside
  modified_base (23)..(23): 2'-O-methylnucleoside
cucgucaauguccucggcugcau

SEQ ID NO: 2914 - RNA, 23 nt, Artificial Sequence
  siRNA antisense strand against MASP2
  modified_base (1)..(1): 2'-Deoxy-2'-fluoronucleoside
  modified_base (2)..(2): 2'-O-methylnucleoside
  modified_base (3)..(3): 2'-Deoxy-2'-fluoronucleoside
  modified_base (4)..(4): 2'-O-methylnucleoside
  modified_base (5)..(5): 2'-Deoxy-2'-fluoronucleoside
  modified_base (6)..(6): 2'-O-methylnucleoside
  modified_base (7)..(7): 2'-Deoxy-2'-fluoronucleoside
  modified_base (8)..(8): 2'-O-methylnucleoside
  modified_base (9)..(9): 2'-Deoxy-2'-fluoronucleoside
  modified_base (10)..(10): 2'-O-methylnucleoside
  modified_base (11)..(11): 2'-O-methylnucleoside
  modified_base (12)..(12): 2'-Deoxy-2'-fluoronucleoside
  modified_base (13)..(13): 2'-O-methylnucleoside
  modified_base (14)..(14): 2'-Deoxy-2'-fluoronucleoside
  modified_base (15)..(15): 2'-O-methylnucleoside
  modified_base (16)..(16): 2'-Deoxy-2'-fluoronucleoside
  modified_base (17)..(17): 2'-O-methylnucleoside
  modified_base (18)..(18): 2'-Deoxy-2'-fluoronucleoside
  modified_base (19)..(19): 2'-O-methylnucleoside
  modified_base (20)..(20): 2'-Deoxy-2'-fluoronucleoside
  modified_base (21)..(21): 2'-O-methylnucleoside
  modified_base (22)..(22): 2'-Deoxy-2'-fluoronucleoside
  modified_base (23)..(23): 2'-O-methylnucleoside
agaaagucguagggacacagggu

SEQ ID NO: 2915 - RNA, 23 nt, Artificial Sequence
  siRNA antisense strand against MASP2
  modified_base (1)..(1): 2'-Deoxy-2'-fluoronucleoside
  modified_base (2)..(2): 2'-O-methylnucleoside
  modified_base (3)..(3): 2'-Deoxy-2'-fluoronucleoside
  modified_base (4)..(4): 2'-O-methylnucleoside
  modified_base (5)..(5): 2'-Deoxy-2'-fluoronucleoside
  modified_base (6)..(6): 2'-O-methylnucleoside
  modified_base (7)..(7): 2'-Deoxy-2'-fluoronucleoside
  modified_base (8)..(8): 2'-O-methylnucleoside
  modified_base (9)..(9): 2'-Deoxy-2'-fluoronucleoside
  modified_base (10)..(10): 2'-O-methylnucleoside
  modified_base (11)..(11): 2'-O-methylnucleoside
  modified_base (12)..(12): 2'-Deoxy-2'-fluoronucleoside
  modified_base (13)..(13): 2'-O-methylnucleoside
  modified_base (14)..(14): 2'-Deoxy-2'-fluoronucleoside
  modified_base (15)..(15): 2'-O-methylnucleoside
  modified_base (16)..(16): 2'-Deoxy-2'-fluoronucleoside
  modified_base (17)..(17): 2'-O-methylnucleoside
  modified_base (18)..(18): 2'-Deoxy-2'-fluoronucleoside
  modified_base (19)..(19): 2'-O-methylnucleoside
  modified_base (20)..(20): 2'-Deoxy-2'-fluoronucleoside
  modified_base (21)..(21): 2'-O-methylnucleoside
  modified_base (22)..(22): 2'-Deoxy-2'-fluoronucleoside
  modified_base (23)..(23): 2'-O-methylnucleoside
ugaaucuugagaaagucguaggg

SEQ ID NO: 2916 - RNA, 23 nt, Artificial Sequence
  siRNA antisense strand against MASP2
  modified_base (1)..(1): 2'-Deoxy-2'-fluoronucleoside
  modified_base (2)..(2): 2'-O-methylnucleoside
  modified_base (3)..(3): 2'-Deoxy-2'-fluoronucleoside
  modified_base (4)..(4): 2'-O-methylnucleoside
  modified_base (5)..(5): 2'-Deoxy-2'-fluoronucleoside
  modified_base (6)..(6): 2'-O-methylnucleoside
  modified_base (7)..(7): 2'-Deoxy-2'-fluoronucleoside
  modified_base (8)..(8): 2'-O-methylnucleoside
  modified_base (9)..(9): 2'-Deoxy-2'-fluoronucleoside
  modified_base (10)..(10): 2'-O-methylnucleoside
  modified_base (11)..(11): 2'-O-methylnucleoside
  modified_base (12)..(12): 2'-Deoxy-2'-fluoronucleoside
  modified_base (13)..(13): 2'-O-methylnucleoside
  modified_base (14)..(14): 2'-Deoxy-2'-fluoronucleoside
  modified_base (15)..(15): 2'-O-methylnucleoside
  modified_base (16)..(16): 2'-Deoxy-2'-fluoronucleoside
  modified_base (17)..(17): 2'-O-methylnucleoside
  modified_base (18)..(18): 2'-Deoxy-2'-fluoronucleoside
  modified_base (19)..(19): 2'-O-methylnucleoside
  modified_base (20)..(20): 2'-Deoxy-2'-fluoronucleoside
  modified_base (21)..(21): 2'-O-methylnucleoside
  modified_base (22)..(22): 2'-Deoxy-2'-fluoronucleoside
  modified_base (23)..(23): 2'-O-methylnucleoside
ugucuguuugaaucuugagaaag

SEQ ID NO: 2917 - RNA, 23 nt, Artificial Sequence
  siRNA antisense strand against MASP2
  modified_base (1)..(1): 2'-Deoxy-2'-fluoronucleoside
  modified_base (2)..(2): 2'-O-methylnucleoside
  modified_base (3)..(3): 2'-Deoxy-2'-fluoronucleoside
  modified_base (4)..(4): 2'-O-methylnucleoside
  modified_base (5)..(5): 2'-Deoxy-2'-fluoronucleoside
  modified_base (6)..(6): 2'-O-methylnucleoside
  modified_base (7)..(7): 2'-Deoxy-2'-fluoronucleoside
  modified_base (8)..(8): 2'-O-methylnucleoside
  modified_base (9)..(9): 2'-Deoxy-2'-fluoronucleoside
  modified_base (10)..(10): 2'-O-methylnucleoside
  modified_base (11)..(11): 2'-O-methylnucleoside
  modified_base (12)..(12): 2'-Deoxy-2'-fluoronucleoside
  modified_base (13)..(13): 2'-O-methylnucleoside
  modified_base (14)..(14): 2'-Deoxy-2'-fluoronucleoside
  modified_base (15)..(15): 2'-O-methylnucleoside
  modified_base (16)..(16): 2'-Deoxy-2'-fluoronucleoside
  modified_base (17)..(17): 2'-O-methylnucleoside
  modified_base (18)..(18): 2'-Deoxy-2'-fluoronucleoside
  modified_base (19)..(19): 2'-O-methylnucleoside
  modified_base (20)..(20): 2'-Deoxy-2'-fluoronucleoside
  modified_base (21)..(21): 2'-O-methylnucleoside
  modified_base (22)..(22): 2'-Deoxy-2'-fluoronucleoside
  modified_base (23)..(23): 2'-O-methylnucleoside
cugucuguuugaaucuugagaaa

SEQ ID NO: 2918 - RNA, 23 nt, Artificial Sequence
  siRNA antisense strand against MASP2
  modified_base (1)..(1): 2'-Deoxy-2'-fluoronucleoside
  modified_base (2)..(2): 2'-O-methylnucleoside
  modified_base (3)..(3): 2'-Deoxy-2'-fluoronucleoside
  modified_base (4)..(4): 2'-O-methylnucleoside
  modified_base (5)..(5): 2'-Deoxy-2'-fluoronucleoside
  modified_base (6)..(6): 2'-O-methylnucleoside
  modified_base (7)..(7): 2'-Deoxy-2'-fluoronucleoside
  modified_base (8)..(8): 2'-O-methylnucleoside
  modified_base (9)..(9): 2'-Deoxy-2'-fluoronucleoside
  modified_base (10)..(10): 2'-O-methylnucleoside
  modified_base (11)..(11): 2'-O-methylnucleoside
  modified_base (12)..(12): 2'-Deoxy-2'-fluoronucleoside
  modified_base (13)..(13): 2'-O-methylnucleoside
  modified_base (14)..(14): 2'-Deoxy-2'-fluoronucleoside
  modified_base (15)..(15): 2'-O-methylnucleoside
  modified_base (16)..(16): 2'-Deoxy-2'-fluoronucleoside
  modified_base (17)..(17): 2'-O-methylnucleoside
  modified_base (18)..(18): 2'-Deoxy-2'-fluoronucleoside
  modified_base (19)..(19): 2'-O-methylnucleoside
  modified_base (20)..(20): 2'-Deoxy-2'-fluoronucleoside
  modified_base (21)..(21): 2'-O-methylnucleoside
  modified_base (22)..(22): 2'-Deoxy-2'-fluoronucleoside
  modified_base (23)..(23): 2'-O-methylnucleoside
ggucuccugauucaucugugaca

SEQ ID NO: 2919 - RNA, 23 nt, Artificial Sequence
  siRNA antisense strand against MASP2
  modified_base (1)..(1): 2'-Deoxy-2'-fluoronucleoside
  modified_base (2)..(2): 2'-O-methylnucleoside
  modified_base (3)..(3): 2'-Deoxy-2'-fluoronucleoside
  modified_base (4)..(4): 2'-O-methylnucleoside
  modified_base (5)..(5): 2'-Deoxy-2'-fluoronucleoside
  modified_base (6)..(6): 2'-O-methylnucleoside
  modified_base (7)..(7): 2'-Deoxy-2'-fluoronucleoside
  modified_base (8)..(8): 2'-O-methylnucleoside
  modified_base (9)..(9): 2'-Deoxy-2'-fluoronucleoside
  modified_base (10)..(10): 2'-O-methylnucleoside
  modified_base (11)..(11): 2'-O-methylnucleoside
  modified_base (12)..(12): 2'-Deoxy-2'-fluoronucleoside
  modified_base (13)..(13): 2'-O-methylnucleoside
  modified_base (14)..(14): 2'-Deoxy-2'-fluoronucleoside
  modified_base (15)..(15): 2'-O-methylnucleoside
  modified_base (16)..(16): 2'-Deoxy-2'-fluoronucleoside
  modified_base (17)..(17): 2'-O-methylnucleoside
  modified_base (18)..(18): 2'-Deoxy-2'-fluoronucleoside
  modified_base (19)..(19): 2'-O-methylnucleoside
  modified_base (20)..(20): 2'-Deoxy-2'-fluoronucleoside
  modified_base (21)..(21): 2'-O-methylnucleoside
  modified_base (22)..(22): 2'-Deoxy-2'-fluoronucleoside
  modified_base (23)..(23): 2'-O-methylnucleoside
ugucuuucaggauguauuuggcu

SEQ ID NO: 2920 - RNA, 23 nt, Artificial Sequence
  siRNA antisense strand against MASP2
  modified_base (1)..(1): 2'-Deoxy-2'-fluoronucleoside
  modified_base (2)..(2): 2'-O-methylnucleoside
  modified_base (3)..(3): 2'-Deoxy-2'-fluoronucleoside
  modified_base (4)..(4): 2'-O-methylnucleoside
  modified_base (5)..(5): 2'-Deoxy-2'-fluoronucleoside
  modified_base (6)..(6): 2'-O-methylnucleoside
  modified_base (7)..(7): 2'-Deoxy-2'-fluoronucleoside
  modified_base (8)..(8): 2'-O-methylnucleoside
  modified_base (9)..(9): 2'-Deoxy-2'-fluoronucleoside
  modified_base (10)..(10): 2'-O-methylnucleoside
  modified_base (11)..(11): 2'-O-methylnucleoside
  modified_base (12)..(12): 2'-Deoxy-2'-fluoronucleoside
  modified_base (13)..(13): 2'-O-methylnucleoside
  modified_base (14)..(14): 2'-Deoxy-2'-fluoronucleoside
  modified_base (15)..(15): 2'-O-methylnucleoside
  modified_base (16)..(16): 2'-Deoxy-2'-fluoronucleoside
  modified_base (17)..(17): 2'-O-methylnucleoside
  modified_base (18)..(18): 2'-Deoxy-2'-fluoronucleoside
  modified_base (19)..(19): 2'-O-methylnucleoside
  modified_base (20)..(20): 2'-Deoxy-2'-fluoronucleoside
  modified_base (21)..(21): 2'-O-methylnucleoside
  modified_base (22)..(22): 2'-Deoxy-2'-fluoronucleoside
  modified_base (23)..(23): 2'-O-methylnucleoside
auggagaagcugucuuucaggau

SEQ ID NO: 2921 - RNA, 23 nt, Artificial Sequence
  siRNA antisense strand against MASP2
  modified_base (1)..(1): 2'-Deoxy-2'-fluoronucleoside
  modified_base (2)..(2): 2'-O-methylnucleoside
  modified_base (3)..(3): 2'-Deoxy-2'-fluoronucleoside
  modified_base (4)..(4): 2'-O-methylnucleoside
  modified_base (5)..(5): 2'-Deoxy-2'-fluoronucleoside
  modified_base (6)..(6): 2'-O-methylnucleoside
  modified_base (7)..(7): 2'-Deoxy-2'-fluoronucleoside
  modified_base (8)..(8): 2'-O-methylnucleoside
  modified_base (9)..(9): 2'-Deoxy-2'-fluoronucleoside
  modified_base (10)..(10): 2'-O-methylnucleoside
  modified_base (11)..(11): 2'-O-methylnucleoside
  modified_base (12)..(12): 2'-Deoxy-2'-fluoronucleoside
  modified_base (13)..(13): 2'-O-methylnucleoside
  modified_base (14)..(14): 2'-Deoxy-2'-fluoronucleoside
  modified_base (15)..(15): 2'-O-methylnucleoside
  modified_base (16)..(16): 2'-Deoxy-2'-fluoronucleoside
  modified_base (17)..(17): 2'-O-methylnucleoside
  modified_base (18)..(18): 2'-Deoxy-2'-fluoronucleoside
  modified_base (19)..(19): 2'-O-methylnucleoside
  modified_base (20)..(20): 2'-Deoxy-2'-fluoronucleoside
  modified_base (21)..(21): 2'-O-methylnucleoside
  modified_base (22)..(22): 2'-Deoxy-2'-fluoronucleoside
  modified_base (23)..(23): 2'-O-methylnucleoside
ugcagaagcucauagccagucuc

SEQ ID NO: 2922 - RNA, 23 nt, Artificial Sequence
  siRNA antisense strand against MASP2
  modified_base (1)..(1): 2'-Deoxy-2'-fluoronucleoside
  modified_base (2)..(2): 2'-O-methylnucleoside
  modified_base (3)..(3): 2'-Deoxy-2'-fluoronucleoside
  modified_base (4)..(4): 2'-O-methylnucleoside
  modified_base (5)..(5): 2'-Deoxy-2'-fluoronucleoside
  modified_base (6)..(6): 2'-O-methylnucleoside
  modified_base (7)..(7): 2'-Deoxy-2'-fluoronucleoside
  modified_base (8)..(8): 2'-O-methylnucleoside
  modified_base (9)..(9): 2'-Deoxy-2'-fluoronucleoside
  modified_base (10)..(10): 2'-O-methylnucleoside
  modified_base (11)..(11): 2'-O-methylnucleoside
  modified_base (12)..(12): 2'-Deoxy-2'-fluoronucleoside
  modified_base (13)..(13): 2'-O-methylnucleoside
  modified_base (14)..(14): 2'-Deoxy-2'-fluoronucleoside
  modified_base (15)..(15): 2'-O-methylnucleoside
  modified_base (16)..(16): 2'-Deoxy-2'-fluoronucleoside
  modified_base (17)..(17): 2'-O-methylnucleoside
  modified_base (18)..(18): 2'-Deoxy-2'-fluoronucleoside
  modified_base (19)..(19): 2'-O-methylnucleoside
  modified_base (20)..(20): 2'-Deoxy-2'-fluoronucleoside
  modified_base (21)..(21): 2'-O-methylnucleoside
  modified_base (22)..(22): 2'-Deoxy-2'-fluoronucleoside
  modified_base (23)..(23): 2'-O-methylnucleoside
uacugaaucacagcuuuguaggu

SEQ ID NO: 2923 - RNA, 23 nt, Artificial Sequence
  siRNA antisense strand against MASP2
  modified_base (1)..(1): 2'-Deoxy-2'-fluoronucleoside
  modified_base (2)..(2): 2'-O-methylnucleoside
  modified_base (3)..(3): 2'-Deoxy-2'-fluoronucleoside
  modified_base (4)..(4): 2'-O-methylnucleoside
  modified_base (5)..(5): 2'-Deoxy-2'-fluoronucleoside
  modified_base (6)..(6): 2'-O-methylnucleoside
  modified_base (7)..(7): 2'-Deoxy-2'-fluoronucleoside
  modified_base (8)..(8): 2'-O-methylnucleoside
  modified_base (9)..(9): 2'-Deoxy-2'-fluoronucleoside
  modified_base (10)..(10): 2'-O-methylnucleoside
  modified_base (11)..(11): 2'-O-methylnucleoside
  modified_base (12)..(12): 2'-Deoxy-2'-fluoronucleoside
  modified_base (13)..(13): 2'-O-methylnucleoside
  modified_base (14)..(14): 2'-Deoxy-2'-fluoronucleoside
  modified_base (15)..(15): 2'-O-methylnucleoside
  modified_base (16)..(16): 2'-Deoxy-2'-fluoronucleoside
  modified_base (17)..(17): 2'-O-methylnucleoside
  modified_base (18)..(18): 2'-Deoxy-2'-fluoronucleoside
  modified_base (19)..(19): 2'-O-methylnucleoside
  modified_base (20)..(20): 2'-Deoxy-2'-fluoronucleoside
  modified_base (21)..(21): 2'-O-methylnucleoside
  modified_base (22)..(22): 2'-Deoxy-2'-fluoronucleoside
  modified_base (23)..(23): 2'-O-methylnucleoside
guacugaaucacagcuuuguagg

SEQ ID NO: 2924 - RNA, 23 nt, Artificial Sequence
  siRNA antisense strand against MASP2
  modified_base (1)..(1): 2'-Deoxy-2'-fluoronucleoside
  modified_base (2)..(2): 2'-O-methylnucleoside
  modified_base (3)..(3): 2'-Deoxy-2'-fluoronucleoside
  modified_base (4)..(4): 2'-O-methylnucleoside
  modified_base (5)..(5): 2'-Deoxy-2'-fluoronucleoside
  modified_base (6)..(6): 2'-O-methylnucleoside
  modified_base (7)..(7): 2'-Deoxy-2'-fluoronucleoside
  modified_base (8)..(8): 2'-O-methylnucleoside
  modified_base (9)..(9): 2'-Deoxy-2'-fluoronucleoside
  modified_base (10)..(10): 2'-O-methylnucleoside
  modified_base (11)..(11): 2'-O-methylnucleoside
  modified_base (12)..(12): 2'-Deoxy-2'-fluoronucleoside
  modified_base (13)..(13): 2'-O-methylnucleoside
  modified_base (14)..(14): 2'-Deoxy-2'-fluoronucleoside
  modified_base (15)..(15): 2'-O-methylnucleoside
  modified_base (16)..(16): 2'-Deoxy-2'-fluoronucleoside
  modified_base (17)..(17): 2'-O-methylnucleoside
  modified_base (18)..(18): 2'-Deoxy-2'-fluoronucleoside
  modified_base (19)..(19): 2'-O-methylnucleoside
  modified_base (20)..(20): 2'-Deoxy-2'-fluoronucleoside
  modified_base (21)..(21): 2'-O-methylnucleoside
  modified_base (22)..(22): 2'-Deoxy-2'-fluoronucleoside
  modified_base (23)..(23): 2'-O-methylnucleoside
uguacugaaucacagcuuuguag

SEQ ID NO: 2925 - RNA, 23 nt, Artificial Sequence
  siRNA antisense strand against MASP2
  modified_base (1)..(1): 2'-Deoxy-2'-fluoronucleoside
  modified_base (2)..(2): 2'-O-methylnucleoside
  modified_base (3)..(3): 2'-Deoxy-2'-fluoronucleoside
  modified_base (4)..(4): 2'-O-methylnucleoside
  modified_base (5)..(5): 2'-Deoxy-2'-fluoronucleoside
  modified_base (6)..(6): 2'-O-methylnucleoside
  modified_base (7)..(7): 2'-Deoxy-2'-fluoronucleoside
  modified_base (8)..(8): 2'-O-methylnucleoside
  modified_base (9)..(9): 2'-Deoxy-2'-fluoronucleoside
  modified_base (10)..(10): 2'-O-methylnucleoside
  modified_base (11)..(11): 2'-O-methylnucleoside
  modified_base (12)..(12): 2'-Deoxy-2'-fluoronucleoside
  modified_base (13)..(13): 2'-O-methylnucleoside
  modified_base (14)..(14): 2'-Deoxy-2'-fluoronucleoside
  modified_base (15)..(15): 2'-O-methylnucleoside
  modified_base (16)..(16): 2'-Deoxy-2'-fluoronucleoside
  modified_base (17)..(17): 2'-O-methylnucleoside
  modified_base (18)..(18): 2'-Deoxy-2'-fluoronucleoside
  modified_base (19)..(19): 2'-O-methylnucleoside
  modified_base (20)..(20): 2'-Deoxy-2'-fluoronucleoside
  modified_base (21)..(21): 2'-O-methylnucleoside
  modified_base (22)..(22): 2'-Deoxy-2'-fluoronucleoside
  modified_base (23)..(23): 2'-O-methylnucleoside
uucacagcuguacugaaucacag

SEQ ID NO: 2926 - RNA, 23 nt, Artificial Sequence
  siRNA antisense strand against MASP2
  modified_base (1)..(1): 2'-Deoxy-2'-fluoronucleoside
  modified_base (2)..(2): 2'-O-methylnucleoside
  modified_base (3)..(3): 2'-Deoxy-2'-fluoronucleoside
  modified_base (4)..(4): 2'-O-methylnucleoside
  modified_base (5)..(5): 2'-Deoxy-2'-fluoronucleoside
  modified_base (6)..(6): 2'-O-methylnucleoside
  modified_base (7)..(7): 2'-Deoxy-2'-fluoronucleoside
  modified_base (8)..(8): 2'-O-methylnucleoside
  modified_base (9)..(9): 2'-Deoxy-2'-fluoronucleoside
  modified_base (10)..(10): 2'-O-methylnucleoside
  modified_base (11)..(11): 2'-O-methylnucleoside
  modified_base (12)..(12): 2'-Deoxy-2'-fluoronucleoside
  modified_base (13)..(13): 2'-O-methylnucleoside
  modified_base (14)..(14): 2'-Deoxy-2'-fluoronucleoside
  modified_base (15)..(15): 2'-O-methylnucleoside
  modified_base (16)..(16): 2'-Deoxy-2'-fluoronucleoside
  modified_base (17)..(17): 2'-O-methylnucleoside
  modified_base (18)..(18): 2'-Deoxy-2'-fluoronucleoside
  modified_base (19)..(19): 2'-O-methylnucleoside
  modified_base (20)..(20): 2'-Deoxy-2'-fluoronucleoside
  modified_base (21)..(21): 2'-O-methylnucleoside
  modified_base (22)..(22): 2'-Deoxy-2'-fluoronucleoside
  modified_base (23)..(23): 2'-O-methylnucleoside
ucucuucacagcuguacugaauc

SEQ ID NO: 2927 - RNA, 23 nt, Artificial Sequence
  siRNA antisense strand against MASP2
  modified_base (1)..(1): 2'-Deoxy-2'-fluoronucleoside
  modified_base (2)..(2): 2'-O-methylnucleoside
  modified_base (3)..(3): 2'-Deoxy-2'-fluoronucleoside
  modified_base (4)..(4): 2'-O-methylnucleoside
  modified_base (5)..(5): 2'-Deoxy-2'-fluoronucleoside
  modified_base (6)..(6): 2'-O-methylnucleoside
  modified_base (7)..(7): 2'-Deoxy-2'-fluoronucleoside
  modified_base (8)..(8): 2'-O-methylnucleoside
  modified_base (9)..(9): 2'-Deoxy-2'-fluoronucleoside
  modified_base (10)..(10): 2'-O-methylnucleoside
  modified_base (11)..(11): 2'-O-methylnucleoside
  modified_base (12)..(12): 2'-Deoxy-2'-fluoronucleoside
  modified_base (13)..(13): 2'-O-methylnucleoside
  modified_base (14)..(14): 2'-Deoxy-2'-fluoronucleoside
  modified_base (15)..(15): 2'-O-methylnucleoside
  modified_base (16)..(16): 2'-Deoxy-2'-fluoronucleoside
  modified_base (17)..(17): 2'-O-methylnucleoside
  modified_base (18)..(18): 2'-Deoxy-2'-fluoronucleoside
  modified_base (19)..(19): 2'-O-methylnucleoside
  modified_base (20)..(20): 2'-Deoxy-2'-fluoronucleoside
  modified_base (21)..(21): 2'-O-methylnucleoside
  modified_base (22)..(22): 2'-Deoxy-2'-fluoronucleoside
  modified_base (23)..(23): 2'-O-methylnucleoside
ggucucuucacagcuguacugaa

SEQ ID NO: 2928 - RNA, 23 nt, Artificial Sequence
  siRNA antisense strand against MASP2
  modified_base (1)..(1): 2'-Deoxy-2'-fluoronucleoside
  modified_base (2)..(2): 2'-O-methylnucleoside
  modified_base (3)..(3): 2'-Deoxy-2'-fluoronucleoside
  modified_base (4)..(4): 2'-O-methylnucleoside
  modified_base (5)..(5): 2'-Deoxy-2'-fluoronucleoside
  modified_base (6)..(6): 2'-O-methylnucleoside
  modified_base (7)..(7): 2'-Deoxy-2'-fluoronucleoside
  modified_base (8)..(8): 2'-O-methylnucleoside
  modified_base (9)..(9): 2'-Deoxy-2'-fluoronucleoside
  modified_base (10)..(10): 2'-O-methylnucleoside
  modified_base (11)..(11): 2'-O-methylnucleoside
  modified_base (12)..(12): 2'-Deoxy-2'-fluoronucleoside
  modified_base (13)..(13): 2'-O-methylnucleoside
  modified_base (14)..(14): 2'-Deoxy-2'-fluoronucleoside
  modified_base (15)..(15): 2'-O-methylnucleoside
  modified_base (16)..(16): 2'-Deoxy-2'-fluoronucleoside
  modified_base (17)..(17): 2'-O-methylnucleoside
  modified_base (18)..(18): 2'-Deoxy-2'-fluoronucleoside
  modified_base (19)..(19): 2'-O-methylnucleoside
  modified_base (20)..(20): 2'-Deoxy-2'-fluoronucleoside
  modified_base (21)..(21): 2'-O-methylnucleoside
  modified_base (22)..(22): 2'-Deoxy-2'-fluoronucleoside
  modified_base (23)..(23): 2'-O-methylnucleoside
gaaggucucuucacagcuguacu

SEQ ID NO: 2929 - RNA, 23 nt, Artificial Sequence
  siRNA antisense strand against MASP2
  modified_base (1)..(1): 2'-Deoxy-2'-fluoronucleoside
  modified_base (2)..(2): 2'-O-methylnucleoside
  modified_base (3)..(3): 2'-Deoxy-2'-fluoronucleoside
  modified_base (4)..(4): 2'-O-methylnucleoside
  modified_base (5)..(5): 2'-Deoxy-2'-fluoronucleoside
  modified_base (6)..(6): 2'-O-methylnucleoside
  modified_base (7)..(7): 2'-Deoxy-2'-fluoronucleoside
  modified_base (8)..(8): 2'-O-methylnucleoside
  modified_base (9)..(9): 2'-Deoxy-2'-fluoronucleoside
  modified_base (10)..(10): 2'-O-methylnucleoside
  modified_base (11)..(11): 2'-O-methylnucleoside
  modified_base (12)..(12): 2'-Deoxy-2'-fluoronucleoside
  modified_base (13)..(13): 2'-O-methylnucleoside
  modified_base (14)..(14): 2'-Deoxy-2'-fluoronucleoside
  modified_base (15)..(15): 2'-O-methylnucleoside
  modified_base (16)..(16): 2'-Deoxy-2'-fluoronucleoside
  modified_base (17)..(17): 2'-O-methylnucleoside
  modified_base (18)..(18): 2'-Deoxy-2'-fluoronucleoside
  modified_base (19)..(19): 2'-O-methylnucleoside
  modified_base (20)..(20): 2'-Deoxy-2'-fluoronucleoside
  modified_base (21)..(21): 2'-O-methylnucleoside
  modified_base (22)..(22): 2'-Deoxy-2'-fluoronucleoside
  modified_base (23)..(23): 2'-O-methylnucleoside
uguagaaggucucuucacagcug

SEQ ID NO: 2930 - RNA, 23 nt, Artificial Sequence
  siRNA antisense strand against MASP2
  modified_base (1)..(1): 2'-Deoxy-2'-fluoronucleoside
  modified_base (2)..(2): 2'-O-methylnucleoside
  modified_base (3)..(3): 2'-Deoxy-2'-fluoronucleoside
  modified_base (4)..(4): 2'-O-methylnucleoside
  modified_base (5)..(5): 2'-Deoxy-2'-fluoronucleoside
  modified_base (6)..(6): 2'-O-methylnucleoside
  modified_base (7)..(7): 2'-Deoxy-2'-fluoronucleoside
  modified_base (8)..(8): 2'-O-methylnucleoside
  modified_base (9)..(9): 2'-Deoxy-2'-fluoronucleoside
  modified_base (10)..(10): 2'-O-methylnucleoside
  modified_base (11)..(11): 2'-O-methylnucleoside
  modified_base (12)..(12): 2'-Deoxy-2'-fluoronucleoside
  modified_base (13)..(13): 2'-O-methylnucleoside
  modified_base (14)..(14): 2'-Deoxy-2'-fluoronucleoside
  modified_base (15)..(15): 2'-O-methylnucleoside
  modified_base (16)..(16): 2'-Deoxy-2'-fluoronucleoside
  modified_base (17)..(17): 2'-O-methylnucleoside
  modified_base (18)..(18): 2'-Deoxy-2'-fluoronucleoside
  modified_base (19)..(19): 2'-O-methylnucleoside
  modified_base (20)..(20): 2'-Deoxy-2'-fluoronucleoside
  modified_base (21)..(21): 2'-O-methylnucleoside
  modified_base (22)..(22): 2'-Deoxy-2'-fluoronucleoside
  modified_base (23)..(23): 2'-O-methylnucleoside
guguagaaggucucuucacagcu

SEQ ID NO: 2931 - RNA, 23 nt, Artificial Sequence
  siRNA antisense strand against MASP2
  modified_base (1)..(1): 2'-Deoxy-2'-fluoronucleoside
  modified_base (2)..(2): 2'-O-methylnucleoside
  modified_base (3)..(3): 2'-Deoxy-2'-fluoronucleoside
  modified_base (4)..(4): 2'-O-methylnucleoside
  modified_base (5)..(5): 2'-Deoxy-2'-fluoronucleoside
  modified_base (6)..(6): 2'-O-methylnucleoside
  modified_base (7)..(7): 2'-Deoxy-2'-fluoronucleoside
  modified_base (8)..(8): 2'-O-methylnucleoside
  modified_base (9)..(9): 2'-Deoxy-2'-fluoronucleoside
  modified_base (10)..(10): 2'-O-methylnucleoside
  modified_base (11)..(11): 2'-O-methylnucleoside
  modified_base (12)..(12): 2'-Deoxy-2'-fluoronucleoside
  modified_base (13)..(13): 2'-O-methylnucleoside
  modified_base (14)..(14): 2'-Deoxy-2'-fluoronucleoside
  modified_base (15)..(15): 2'-O-methylnucleoside
  modified_base (16)..(16): 2'-Deoxy-2'-fluoronucleoside
  modified_base (17)..(17): 2'-O-methylnucleoside
  modified_base (18)..(18): 2'-Deoxy-2'-fluoronucleoside
  modified_base (19)..(19): 2'-O-methylnucleoside
  modified_base (20)..(20): 2'-Deoxy-2'-fluoronucleoside
  modified_base (21)..(21): 2'-O-methylnucleoside
  modified_base (22)..(22): 2'-Deoxy-2'-fluoronucleoside
  modified_base (23)..(23): 2'-O-methylnucleoside
uuguguagaaggucucuucacag

SEQ ID NO: 2932 - RNA, 23 nt, Artificial Sequence
  siRNA antisense strand against MASP2
  modified_base (1)..(1): 2'-Deoxy-2'-fluoronucleoside
  modified_base (2)..(2): 2'-O-methylnucleoside
  modified_base (3)..(3): 2'-Deoxy-2'-fluoronucleoside
  modified_base (4)..(4): 2'-O-methylnucleoside
  modified_base (5)..(5): 2'-Deoxy-2'-fluoronucleoside
  modified_base (6)..(6): 2'-O-methylnucleoside
  modified_base (7)..(7): 2'-Deoxy-2'-fluoronucleoside
  modified_base (8)..(8): 2'-O-methylnucleoside
  modified_base (9)..(9): 2'-Deoxy-2'-fluoronucleoside
  modified_base (10)..(10): 2'-O-methylnucleoside
  modified_base (11)..(11): 2'-O-methylnucleoside
  modified_base (12)..(12): 2'-Deoxy-2'-fluoronucleoside
  modified_base (13)..(13): 2'-O-methylnucleoside
  modified_base (14)..(14): 2'-Deoxy-2'-fluoronucleoside
  modified_base (15)..(15): 2'-O-methylnucleoside
  modified_base (16)..(16): 2'-Deoxy-2'-fluoronucleoside
  modified_base (17)..(17): 2'-O-methylnucleoside
  modified_base (18)..(18): 2'-Deoxy-2'-fluoronucleoside
  modified_base (19)..(19): 2'-O-methylnucleoside
  modified_base (20)..(20): 2'-Deoxy-2'-fluoronucleoside
  modified_base (21)..(21): 2'-O-methylnucleoside
  modified_base (22)..(22): 2'-Deoxy-2'-fluoronucleoside
  modified_base (23)..(23): 2'-O-methylnucleoside
uuaccaucauucacuuucauugu

SEQ ID NO: 2933 - RNA, 23 nt, Artificial Sequence
  siRNA antisense strand against MASP2
  modified_base (1)..(1): 2'-Deoxy-2'-fluoronucleoside
  modified_base (2)..(2): 2'-O-methylnucleoside
  modified_base (3)..(3): 2'-Deoxy-2'-fluoronucleoside
  modified_base (4)..(4): 2'-O-methylnucleoside
  modified_base (5)..(5): 2'-Deoxy-2'-fluoronucleoside
  modified_base (6)..(6): 2'-O-methylnucleoside
  modified_base (7)..(7): 2'-Deoxy-2'-fluoronucleoside
  modified_base (8)..(8): 2'-O-methylnucleoside
  modified_base (9)..(9): 2'-Deoxy-2'-fluoronucleoside
  modified_base (10)..(10): 2'-O-methylnucleoside
  modified_base (11)..(11): 2'-O-methylnucleoside
  modified_base (12)..(12): 2'-Deoxy-2'-fluoronucleoside
  modified_base (13)..(13): 2'-O-methylnucleoside
  modified_base (14)..(14): 2'-Deoxy-2'-fluoronucleoside
  modified_base (15)..(15): 2'-O-methylnucleoside
  modified_base (16)..(16): 2'-Deoxy-2'-fluoronucleoside
  modified_base (17)..(17): 2'-O-methylnucleoside
  modified_base (18)..(18): 2'-Deoxy-2'-fluoronucleoside
  modified_base (19)..(19): 2'-O-methylnucleoside
  modified_base (20)..(20): 2'-Deoxy-2'-fluoronucleoside
  modified_base (21)..(21): 2'-O-methylnucleoside
  modified_base (22)..(22): 2'-Deoxy-2'-fluoronucleoside
  modified_base (23)..(23): 2'-O-methylnucleoside
acauauuuaccaucauucacuuu

SEQ ID NO: 2934 - RNA, 23 nt, Artificial Sequence
  siRNA antisense strand against MASP2
  modified_base (1)..(1): 2'-Deoxy-2'-fluoronucleoside
  modified_base (2)..(2): 2'-O-methylnucleoside
  modified_base (3)..(3): 2'-Deoxy-2'-fluoronucleoside
  modified_base (4)..(4): 2'-O-methylnucleoside
  modified_base (5)..(5): 2'-Deoxy-2'-fluoronucleoside
  modified_base (6)..(6): 2'-O-methylnucleoside
  modified_base (7)..(7): 2'-Deoxy-2'-fluoronucleoside
  modified_base (8)..(8): 2'-O-methylnucleoside
  modified_base (9)..(9): 2'-Deoxy-2'-fluoronucleoside
  modified_base (10)..(10): 2'-O-methylnucleoside
  modified_base (11)..(11): 2'-O-methylnucleoside
  modified_base (12)..(12): 2'-Deoxy-2'-fluoronucleoside
  modified_base (13)..(13): 2'-O-methylnucleoside
  modified_base (14)..(14): 2'-Deoxy-2'-fluoronucleoside
  modified_base (15)..(15): 2'-O-methylnucleoside
  modified_base (16)..(16): 2'-Deoxy-2'-fluoronucleoside
  modified_base (17)..(17): 2'-O-methylnucleoside
  modified_base (18)..(18): 2'-Deoxy-2'-fluoronucleoside
  modified_base (19)..(19): 2'-O-methylnucleoside
  modified_base (20)..(20): 2'-Deoxy-2'-fluoronucleoside
  modified_base (21)..(21): 2'-O-methylnucleoside
  modified_base (22)..(22): 2'-Deoxy-2'-fluoronucleoside
  modified_base (23)..(23): 2'-O-methylnucleoside
aucagccucacacacauauuuac

SEQ ID NO: 2935 - RNA, 23 nt, Artificial Sequence
  siRNA antisense strand against MASP2
  modified_base (1)..(1): 2'-Deoxy-2'-fluoronucleoside
  modified_base (2)..(2): 2'-O-methylnucleoside
  modified_base (3)..(3): 2'-Deoxy-2'-fluoronucleoside
  modified_base (4)..(4): 2'-O-methylnucleoside
  modified_base (5)..(5): 2'-Deoxy-2'-fluoronucleoside
  modified_base (6)..(6): 2'-O-methylnucleoside
  modified_base (7)..(7): 2'-Deoxy-2'-fluoronucleoside
  modified_base (8)..(8): 2'-O-methylnucleoside
  modified_base (9)..(9): 2'-Deoxy-2'-fluoronucleoside
  modified_base (10)..(10): 2'-O-methylnucleoside
  modified_base (11)..(11): 2'-O-methylnucleoside
  modified_base (12)..(12): 2'-Deoxy-2'-fluoronucleoside
  modified_base (13)..(13): 2'-O-methylnucleoside
  modified_base (14)..(14): 2'-Deoxy-2'-fluoronucleoside
  modified_base (15)..(15): 2'-O-methylnucleoside
  modified_base (16)..(16): 2'-Deoxy-2'-fluoronucleoside
  modified_base (17)..(17): 2'-O-methylnucleoside
  modified_base (18)..(18): 2'-Deoxy-2'-fluoronucleoside
  modified_base (19)..(19): 2'-O-methylnucleoside
  modified_base (20)..(20): 2'-Deoxy-2'-fluoronucleoside
  modified_base (21)..(21): 2'-O-methylnucleoside
  modified_base (22)..(22): 2'-Deoxy-2'-fluoronucleoside
  modified_base (23)..(23): 2'-O-methylnucleoside
auccaucagccucacacacauau

SEQ ID NO: 2936 - RNA, 23 nt, Artificial Sequence
  siRNA antisense strand against MASP2
  modified_base (1)..(1): 2'-Deoxy-2'-fluoronucleoside
  modified_base (2)..(2): 2'-O-methylnucleoside
  modified_base (3)..(3): 2'-Deoxy-2'-fluoronucleoside
  modified_base (4)..(4): 2'-O-methylnucleoside
  modified_base (5)..(5): 2'-Deoxy-2'-fluoronucleoside
  modified_base (6)..(6): 2'-O-methylnucleoside
  modified_base (7)..(7): 2'-Deoxy-2'-fluoronucleoside
  modified_base (8)..(8): 2'-O-methylnucleoside
  modified_base (9)..(9): 2'-Deoxy-2'-fluoronucleoside
  modified_base (10)..(10): 2'-O-methylnucleoside
  modified_base (11)..(11): 2'-O-methylnucleoside
  modified_base (12)..(12): 2'-Deoxy-2'-fluoronucleoside
  modified_base (13)..(13): 2'-O-methylnucleoside
  modified_base (14)..(14): 2'-Deoxy-2'-fluoronucleoside
  modified_base (15)..(15): 2'-O-methylnucleoside
  modified_base (16)..(16): 2'-Deoxy-2'-fluoronucleoside
  modified_base (17)..(17): 2'-O-methylnucleoside
  modified_base (18)..(18): 2'-Deoxy-2'-fluoronucleoside
  modified_base (19)..(19): 2'-O-methylnucleoside
  modified_base (20)..(20): 2'-Deoxy-2'-fluoronucleoside
  modified_base (21)..(21): 2'-O-methylnucleoside
  modified_base (22)..(22): 2'-Deoxy-2'-fluoronucleoside
  modified_base (23)..(23): 2'-O-methylnucleoside
aauccaucagccucacacacaua

SEQ ID NO: 2937 - RNA, 23 nt, Artificial Sequence
  siRNA antisense strand against MASP2
  modified_base (1)..(1): 2'-Deoxy-2'-fluoronucleoside
  modified_base (2)..(2): 2'-O-methylnucleoside
  modified_base (3)..(3): 2'-Deoxy-2'-fluoronucleoside
  modified_base (4)..(4): 2'-O-methylnucleoside
  modified_base (5)..(5): 2'-Deoxy-2'-fluoronucleoside
  modified_base (6)..(6): 2'-O-methylnucleoside
  modified_base (7)..(7): 2'-Deoxy-2'-fluoronucleoside
  modified_base (8)..(8): 2'-O-methylnucleoside
  modified_base (9)..(9): 2'-Deoxy-2'-fluoronucleoside
  modified_base (10)..(10): 2'-O-methylnucleoside
  modified_base (11)..(11): 2'-O-methylnucleoside
  modified_base (12)..(12): 2'-Deoxy-2'-fluoronucleoside
  modified_base (13)..(13): 2'-O-methylnucleoside
  modified_base (14)..(14): 2'-Deoxy-2'-fluoronucleoside
  modified_base (15)..(15): 2'-O-methylnucleoside
  modified_base (16)..(16): 2'-Deoxy-2'-fluoronucleoside
  modified_base (17)..(17): 2'-O-methylnucleoside
  modified_base (18)..(18): 2'-Deoxy-2'-fluoronucleoside
  modified_base (19)..(19): 2'-O-methylnucleoside
  modified_base (20)..(20): 2'-Deoxy-2'-fluoronucleoside
  modified_base (21)..(21): 2'-O-methylnucleoside
  modified_base (22)..(22): 2'-Deoxy-2'-fluoronucleoside
  modified_base (23)..(23): 2'-O-methylnucleoside
gaauccaucagccucacacacau

SEQ ID NO: 2938 - RNA, 23 nt, Artificial Sequence
  siRNA antisense strand against MASP2
  modified_base (1)..(1): 2'-Deoxy-2'-fluoronucleoside
  modified_base (2)..(2): 2'-O-methylnucleoside
  modified_base (3)..(3): 2'-Deoxy-2'-fluoronucleoside
  modified_base (4)..(4): 2'-O-methylnucleoside
  modified_base (5)..(5): 2'-Deoxy-2'-fluoronucleoside
  modified_base (6)..(6): 2'-O-methylnucleoside
  modified_base (7)..(7): 2'-Deoxy-2'-fluoronucleoside
  modified_base (8)..(8): 2'-O-methylnucleoside
  modified_base (9)..(9): 2'-Deoxy-2'-fluoronucleoside
  modified_base (10)..(10): 2'-O-methylnucleoside
  modified_base (11)..(11): 2'-O-methylnucleoside
  modified_base (12)..(12): 2'-Deoxy-2'-fluoronucleoside
  modified_base (13)..(13): 2'-O-methylnucleoside
  modified_base (14)..(14): 2'-Deoxy-2'-fluoronucleoside
  modified_base (15)..(15): 2'-O-methylnucleoside
  modified_base (16)..(16): 2'-Deoxy-2'-fluoronucleoside
  modified_base (17)..(17): 2'-O-methylnucleoside
  modified_base (18)..(18): 2'-Deoxy-2'-fluoronucleoside
  modified_base (19)..(19): 2'-O-methylnucleoside
  modified_base (20)..(20): 2'-Deoxy-2'-fluoronucleoside
  modified_base (21)..(21): 2'-O-methylnucleoside
  modified_base (22)..(22): 2'-Deoxy-2'-fluoronucleoside
  modified_base (23)..(23): 2'-O-methylnucleoside
agaauccaucagccucacacaca

SEQ ID NO: 2939 - RNA, 23 nt, Artificial Sequence
  siRNA antisense strand against MASP2
  modified_base (1)..(1): 2'-Deoxy-2'-fluoronucleoside
  modified_base (2)..(2): 2'-O-methylnucleoside
  modified_base (3)..(3): 2'-Deoxy-2'-fluoronucleoside
  modified_base (4)..(4): 2'-O-methylnucleoside
  modified_base (5)..(5): 2'-Deoxy-2'-fluoronucleoside
  modified_base (6)..(6): 2'-O-methylnucleoside
  modified_base (7)..(7): 2'-Deoxy-2'-fluoronucleoside
  modified_base (8)..(8): 2'-O-methylnucleoside
  modified_base (9)..(9): 2'-Deoxy-2'-fluoronucleoside
  modified_base (10)..(10): 2'-O-methylnucleoside
  modified_base (11)..(11): 2'-O-methylnucleoside
  modified_base (12)..(12): 2'-Deoxy-2'-fluoronucleoside
  modified_base (13)..(13): 2'-O-methylnucleoside
  modified_base (14)..(14): 2'-Deoxy-2'-fluoronucleoside
  modified_base (15)..(15): 2'-O-methylnucleoside
  modified_base (16)..(16): 2'-Deoxy-2'-fluoronucleoside
  modified_base (17)..(17): 2'-O-methylnucleoside
  modified_base (18)..(18): 2'-Deoxy-2'-fluoronucleoside
  modified_base (19)..(19): 2'-O-methylnucleoside
  modified_base (20)..(20): 2'-Deoxy-2'-fluoronucleoside
  modified_base (21)..(21): 2'-O-methylnucleoside
  modified_base (22)..(22): 2'-Deoxy-2'-fluoronucleoside
  modified_base (23)..(23): 2'-O-methylnucleoside
uccagaauccaucagccucacac

SEQ ID NO: 2940 - RNA, 23 nt, Artificial Sequence
  siRNA antisense strand against MASP2
  modified_base (1)..(1): 2'-Deoxy-2'-fluoronucleoside
  modified_base (2)..(2): 2'-O-methylnucleoside
  modified_base (3)..(3): 2'-Deoxy-2'-fluoronucleoside
  modified_base (4)..(4): 2'-O-methylnucleoside
  modified_base (5)..(5): 2'-Deoxy-2'-fluoronucleoside
  modified_base (6)..(6): 2'-O-methylnucleoside
  modified_base (7)..(7): 2'-Deoxy-2'-fluoronucleoside
  modified_base (8)..(8): 2'-O-methylnucleoside
  modified_base (9)..(9): 2'-Deoxy-2'-fluoronucleoside
  modified_base (10)..(10): 2'-O-methylnucleoside
  modified_base (11)..(11): 2'-O-methylnucleoside
  modified_base (12)..(12): 2'-Deoxy-2'-fluoronucleoside
  modified_base (13)..(13): 2'-O-methylnucleoside
  modified_base (14)..(14): 2'-Deoxy-2'-fluoronucleoside
  modified_base (15)..(15): 2'-O-methylnucleoside
  modified_base (16)..(16): 2'-Deoxy-2'-fluoronucleoside
  modified_base (17)..(17): 2'-O-methylnucleoside
  modified_base (18)..(18): 2'-Deoxy-2'-fluoronucleoside
  modified_base (19)..(19): 2'-O-methylnucleoside
  modified_base (20)..(20): 2'-Deoxy-2'-fluoronucleoside
  modified_base (21)..(21): 2'-O-methylnucleoside
  modified_base (22)..(22): 2'-Deoxy-2'-fluoronucleoside
  modified_base (23)..(23): 2'-O-methylnucleoside
ucguccagaauccaucagccuca

SEQ ID NO: 2941 - RNA, 23 nt, Artificial Sequence
  siRNA antisense strand against MASP2
  modified_base (1)..(1): 2'-Deoxy-2'-fluoronucleoside
  modified_base (2)..(2): 2'-O-methylnucleoside
  modified_base (3)..(3): 2'-Deoxy-2'-fluoronucleoside
  modified_base (4)..(4): 2'-O-methylnucleoside
  modified_base (5)..(5): 2'-Deoxy-2'-fluoronucleoside
  modified_base (6)..(6): 2'-O-methylnucleoside
  modified_base (7)..(7): 2'-Deoxy-2'-fluoronucleoside
  modified_base (8)..(8): 2'-O-methylnucleoside
  modified_base (9)..(9): 2'-Deoxy-2'-fluoronucleoside
  modified_base (10)..(10): 2'-O-methylnucleoside
  modified_base (11)..(11): 2'-O-methylnucleoside
  modified_base (12)..(12): 2'-Deoxy-2'-fluoronucleoside
  modified_base (13)..(13): 2'-O-methylnucleoside
  modified_base (14)..(14): 2'-Deoxy-2'-fluoronucleoside
  modified_base (15)..(15): 2'-O-methylnucleoside
  modified_base (16)..(16): 2'-Deoxy-2'-fluoronucleoside
  modified_base (17)..(17): 2'-O-methylnucleoside
  modified_base (18)..(18): 2'-Deoxy-2'-fluoronucleoside
  modified_base (19)..(19): 2'-O-methylnucleoside
  modified_base (20)..(20): 2'-Deoxy-2'-fluoronucleoside
  modified_base (21)..(21): 2'-O-methylnucleoside
  modified_base (22)..(22): 2'-Deoxy-2'-fluoronucleoside
  modified_base (23)..(23): 2'-O-methylnucleoside
agcucguccagaauccaucagcc

SEQ ID NO: 2942 - RNA, 23 nt, Artificial Sequence
  siRNA antisense strand against MASP2
  modified_base (1)..(1): 2'-Deoxy-2'-fluoronucleoside
  modified_base (2)..(2): 2'-O-methylnucleoside
  modified_base (3)..(3): 2'-Deoxy-2'-fluoronucleoside
  modified_base (4)..(4): 2'-O-methylnucleoside
  modified_base (5)..(5): 2'-Deoxy-2'-fluoronucleoside
  modified_base (6)..(6): 2'-O-methylnucleoside
  modified_base (7)..(7): 2'-Deoxy-2'-fluoronucleoside
  modified_base (8)..(8): 2'-O-methylnucleoside
  modified_base (9)..(9): 2'-Deoxy-2'-fluoronucleoside
  modified_base (10)..(10): 2'-O-methylnucleoside
  modified_base (11)..(11): 2'-O-methylnucleoside
  modified_base (12)..(12): 2'-Deoxy-2'-fluoronucleoside
  modified_base (13)..(13): 2'-O-methylnucleoside
  modified_base (14)..(14): 2'-Deoxy-2'-fluoronucleoside
  modified_base (15)..(15): 2'-O-methylnucleoside
  modified_base (16)..(16): 2'-Deoxy-2'-fluoronucleoside
  modified_base (17)..(17): 2'-O-methylnucleoside
  modified_base (18)..(18): 2'-Deoxy-2'-fluoronucleoside
  modified_base (19)..(19): 2'-O-methylnucleoside
  modified_base (20)..(20): 2'-Deoxy-2'-fluoronucleoside
  modified_base (21)..(21): 2'-O-methylnucleoside
  modified_base (22)..(22): 2'-Deoxy-2'-fluoronucleoside
  modified_base (23)..(23): 2'-O-methylnucleoside
ucuccuuuggagcucguccagaa

SEQ ID NO: 2943 - RNA, 23 nt, Artificial Sequence
  siRNA antisense strand against MASP2
  modified_base (1)..(1): 2'-Deoxy-2'-fluoronucleoside
  modified_base (2)..(2): 2'-O-methylnucleoside
  modified_base (3)..(3): 2'-Deoxy-2'-fluoronucleoside
  modified_base (4)..(4): 2'-O-methylnucleoside
  modified_base (5)..(5): 2'-Deoxy-2'-fluoronucleoside
  modified_base (6)..(6): 2'-O-methylnucleoside
  modified_base (7)..(7): 2'-Deoxy-2'-fluoronucleoside
  modified_base (8)..(8): 2'-O-methylnucleoside
  modified_base (9)..(9): 2'-Deoxy-2'-fluoronucleoside
  modified_base (10)..(10): 2'-O-methylnucleoside
  modified_base (11)..(11): 2'-O-methylnucleoside
  modified_base (12)..(12): 2'-Deoxy-2'-fluoronucleoside
  modified_base (13)..(13): 2'-O-methylnucleoside
  modified_base (14)..(14): 2'-Deoxy-2'-fluoronucleoside
  modified_base (15)..(15): 2'-O-methylnucleoside
  modified_base (16)..(16): 2'-Deoxy-2'-fluoronucleoside
  modified_base (17)..(17): 2'-O-methylnucleoside
  modified_base (18)..(18): 2'-Deoxy-2'-fluoronucleoside
  modified_base (19)..(19): 2'-O-methylnucleoside
  modified_base (20)..(20): 2'-Deoxy-2'-fluoronucleoside
  modified_base (21)..(21): 2'-O-methylnucleoside
  modified_base (22)..(22): 2'-Deoxy-2'-fluoronucleoside
  modified_base (23)..(23): 2'-O-methylnucleoside
ugauuuuucuccuuuggagcucg

SEQ ID NO: 2944 - RNA, 23 nt, Artificial Sequence
  siRNA antisense strand against MASP2
  modified_base (1)..(1): 2'-Deoxy-2'-fluoronucleoside
  modified_base (2)..(2): 2'-O-methylnucleoside
  modified_base (3)..(3): 2'-Deoxy-2'-fluoronucleoside
  modified_base (4)..(4): 2'-O-methylnucleoside
  modified_base (5)..(5): 2'-Deoxy-2'-fluoronucleoside
  modified_base (6)..(6): 2'-O-methylnucleoside
  modified_base (7)..(7): 2'-Deoxy-2'-fluoronucleoside
  modified_base (8)..(8): 2'-O-methylnucleoside
  modified_base (9)..(9): 2'-Deoxy-2'-fluoronucleoside
  modified_base (10)..(10): 2'-O-methylnucleoside
  modified_base (11)..(11): 2'-O-methylnucleoside
  modified_base (12)..(12): 2'-Deoxy-2'-fluoronucleoside
  modified_base (13)..(13): 2'-O-methylnucleoside
  modified_base (14)..(14): 2'-Deoxy-2'-fluoronucleoside
  modified_base (15)..(15): 2'-O-methylnucleoside
  modified_base (16)..(16): 2'-Deoxy-2'-fluoronucleoside
  modified_base (17)..(17): 2'-O-methylnucleoside
  modified_base (18)..(18): 2'-Deoxy-2'-fluoronucleoside
  modified_base (19)..(19): 2'-O-methylnucleoside
  modified_base (20)..(20): 2'-Deoxy-2'-fluoronucleoside
  modified_base (21)..(21): 2'-O-methylnucleoside
  modified_base (22)..(22): 2'-Deoxy-2'-fluoronucleoside
  modified_base (23)..(23): 2'-O-methylnucleoside
ccagguuuugccuuuugcccucc

SEQ ID NO: 2945 - RNA, 23 nt, Artificial Sequence
  siRNA antisense strand against MASP2
  modified_base (1)..(1): 2'-Deoxy-2'-fluoronucleoside
  modified_base (2)..(2): 2'-O-methylnucleoside
  modified_base (3)..(3): 2'-Deoxy-2'-fluoronucleoside
  modified_base (4)..(4): 2'-O-methylnucleoside
  modified_base (5)..(5): 2'-Deoxy-2'-fluoronucleoside
  modified_base (6)..(6): 2'-O-methylnucleoside
  modified_base (7)..(7): 2'-Deoxy-2'-fluoronucleoside
  modified_base (8)..(8): 2'-O-methylnucleoside
  modified_base (9)..(9): 2'-Deoxy-2'-fluoronucleoside
  modified_base (10)..(10): 2'-O-methylnucleoside
  modified_base (11)..(11): 2'-O-methylnucleoside
  modified_base (12)..(12): 2'-Deoxy-2'-fluoronucleoside
  modified_base (13)..(13): 2'-O-methylnucleoside
  modified_base (14)..(14): 2'-Deoxy-2'-fluoronucleoside
  modified_base (15)..(15): 2'-O-methylnucleoside
  modified_base (16)..(16): 2'-Deoxy-2'-fluoronucleoside
  modified_base (17)..(17): 2'-O-methylnucleoside
  modified_base (18)..(18): 2'-Deoxy-2'-fluoronucleoside
  modified_base (19)..(19): 2'-O-methylnucleoside
  modified_base (20)..(20): 2'-Deoxy-2'-fluoronucleoside
  modified_base (21)..(21): 2'-O-methylnucleoside
  modified_base (22)..(22): 2'-Deoxy-2'-fluoronucleoside
  modified_base (23)..(23): 2'-O-methylnucleoside
aaucaccagguuuugccuuuugc

SEQ ID NO: 2946 - RNA, 23 nt, Artificial Sequence
  siRNA antisense strand against MASP2
  modified_base (1)..(1): 2'-Deoxy-2'-fluoronucleoside
  modified_base (2)..(2): 2'-O-methylnucleoside
  modified_base (3)..(3): 2'-Deoxy-2'-fluoronucleoside
  modified_base (4)..(4): 2'-O-methylnucleoside
  modified_base (5)..(5): 2'-Deoxy-2'-fluoronucleoside
  modified_base (6)..(6): 2'-O-methylnucleoside
  modified_base (7)..(7): 2'-Deoxy-2'-fluoronucleoside
  modified_base (8)..(8): 2'-O-methylnucleoside
  modified_base (9)..(9): 2'-Deoxy-2'-fluoronucleoside
  modified_base (10)..(10): 2'-O-methylnucleoside
  modified_base (11)..(11): 2'-O-methylnucleoside
  modified_base (12)..(12): 2'-Deoxy-2'-fluoronucleoside
  modified_base (13)..(13): 2'-O-methylnucleoside
  modified_base (14)..(14): 2'-Deoxy-2'-fluoronucleoside
  modified_base (15)..(15): 2'-O-methylnucleoside
  modified_base (16)..(16): 2'-Deoxy-2'-fluoronucleoside
  modified_base (17)..(17): 2'-O-methylnucleoside
  modified_base (18)..(18): 2'-Deoxy-2'-fluoronucleoside
  modified_base (19)..(19): 2'-O-methylnucleoside
  modified_base (20)..(20): 2'-Deoxy-2'-fluoronucleoside
  modified_base (21)..(21): 2'-O-methylnucleoside
  modified_base (22)..(22): 2'-Deoxy-2'-fluoronucleoside
  modified_base (23)..(23): 2'-O-methylnucleoside
aaaucaccagguuuugccuuuug

SEQ ID NO: 2947 - RNA, 23 nt, Artificial Sequence
  siRNA antisense strand against MASP2
  modified_base (1)..(1): 2'-Deoxy-2'-fluoronucleoside
  modified_base (2)..(2): 2'-O-methylnucleoside
  modified_base (3)..(3): 2'-Deoxy-2'-fluoronucleoside
  modified_base (4)..(4): 2'-O-methylnucleoside
  modified_base (5)..(5): 2'-Deoxy-2'-fluoronucleoside
  modified_base (6)..(6): 2'-O-methylnucleoside
  modified_base (7)..(7): 2'-Deoxy-2'-fluoronucleoside
  modified_base (8)..(8): 2'-O-methylnucleoside
  modified_base (9)..(9): 2'-Deoxy-2'-fluoronucleoside
  modified_base (10)..(10): 2'-O-methylnucleoside
  modified_base (11)..(11): 2'-O-methylnucleoside
  modified_base (12)..(12): 2'-Deoxy-2'-fluoronucleoside
  modified_base (13)..(13): 2'-O-methylnucleoside
  modified_base (14)..(14): 2'-Deoxy-2'-fluoronucleoside
  modified_base (15)..(15): 2'-O-methylnucleoside
  modified_base (16)..(16): 2'-Deoxy-2'-fluoronucleoside
  modified_base (17)..(17): 2'-O-methylnucleoside
  modified_base (18)..(18): 2'-Deoxy-2'-fluoronucleoside
  modified_base (19)..(19): 2'-O-methylnucleoside
  modified_base (20)..(20): 2'-Deoxy-2'-fluoronucleoside
  modified_base (21)..(21): 2'-O-methylnucleoside
  modified_base (22)..(22): 2'-Deoxy-2'-fluoronucleoside
  modified_base (23)..(23): 2'-O-methylnucleoside
aaaaucaccagguuuugccuuuu

SEQ ID NO: 2948 - RNA, 23 nt, Artificial Sequence
  siRNA antisense strand against MASP2
  modified_base (1)..(1): 2'-Deoxy-2'-fluoronucleoside
  modified_base (2)..(2): 2'-O-methylnucleoside
  modified_base (3)..(3): 2'-Deoxy-2'-fluoronucleoside
  modified_base (4)..(4): 2'-O-methylnucleoside
  modified_base (5)..(5): 2'-Deoxy-2'-fluoronucleoside
  modified_base (6)..(6): 2'-O-methylnucleoside
  modified_base (7)..(7): 2'-Deoxy-2'-fluoronucleoside
  modified_base (8)..(8): 2'-O-methylnucleoside
  modified_base (9)..(9): 2'-Deoxy-2'-fluoronucleoside
  modified_base (10)..(10): 2'-O-methylnucleoside
  modified_base (11)..(11): 2'-O-methylnucleoside
  modified_base (12)..(12): 2'-Deoxy-2'-fluoronucleoside
  modified_base (13)..(13): 2'-O-methylnucleoside
  modified_base (14)..(14): 2'-Deoxy-2'-fluoronucleoside
  modified_base (15)..(15): 2'-O-methylnucleoside
  modified_base (16)..(16): 2'-Deoxy-2'-fluoronucleoside
  modified_base (17)..(17): 2'-O-methylnucleoside
  modified_base (18)..(18): 2'-Deoxy-2'-fluoronucleoside
  modified_base (19)..(19): 2'-O-methylnucleoside
  modified_base (20)..(20): 2'-Deoxy-2'-fluoronucleoside
  modified_base (21)..(21): 2'-O-methylnucleoside
  modified_base (22)..(22): 2'-Deoxy-2'-fluoronucleoside
  modified_base (23)..(23): 2'-O-methylnucleoside
ugccaaggaaaaucaccagguuu

SEQ ID NO: 2949 - RNA, 23 nt, Artificial Sequence
  siRNA antisense strand against MASP2
  modified_base (1)..(1): 2'-Deoxy-2'-fluoronucleoside
  modified_base (2)..(2): 2'-O-methylnucleoside
  modified_base (3)..(3): 2'-Deoxy-2'-fluoronucleoside
  modified_base (4)..(4): 2'-O-methylnucleoside
  modified_base (5)..(5): 2'-Deoxy-2'-fluoronucleoside
  modified_base (6)..(6): 2'-O-methylnucleoside
  modified_base (7)..(7): 2'-Deoxy-2'-fluoronucleoside
  modified_base (8)..(8): 2'-O-methylnucleoside
  modified_base (9)..(9): 2'-Deoxy-2'-fluoronucleoside
  modified_base (10)..(10): 2'-O-methylnucleoside
  modified_base (11)..(11): 2'-O-methylnucleoside
  modified_base (12)..(12): 2'-Deoxy-2'-fluoronucleoside
  modified_base (13)..(13): 2'-O-methylnucleoside
  modified_base (14)..(14): 2'-Deoxy-2'-fluoronucleoside
  modified_base (15)..(15): 2'-O-methylnucleoside
  modified_base (16)..(16): 2'-Deoxy-2'-fluoronucleoside
  modified_base (17)..(17): 2'-O-methylnucleoside
  modified_base (18)..(18): 2'-Deoxy-2'-fluoronucleoside
  modified_base (19)..(19): 2'-O-methylnucleoside
  modified_base (20)..(20): 2'-Deoxy-2'-fluoronucleoside
  modified_base (21)..(21): 2'-O-methylnucleoside
  modified_base (22)..(22): 2'-Deoxy-2'-fluoronucleoside
  modified_base (23)..(23): 2'-O-methylnucleoside
uugccaaggaaaaucaccagguu

SEQ ID NO: 2950 - RNA, 23 nt, Artificial Sequence
  siRNA antisense strand against MASP2
  modified_base (1)..(1): 2'-Deoxy-2'-fluoronucleoside
  modified_base (2)..(2): 2'-O-methylnucleoside
  modified_base (3)..(3): 2'-Deoxy-2'-fluoronucleoside
  modified_base (4)..(4): 2'-O-methylnucleoside
  modified_base (5)..(5): 2'-Deoxy-2'-fluoronucleoside
  modified_base (6)..(6): 2'-O-methylnucleoside
  modified_base (7)..(7): 2'-Deoxy-2'-fluoronucleoside
  modified_base (8)..(8): 2'-O-methylnucleoside
  modified_base (9)..(9): 2'-Deoxy-2'-fluoronucleoside
  modified_base (10)..(10): 2'-O-methylnucleoside
  modified_base (11)..(11): 2'-O-methylnucleoside
  modified_base (12)..(12): 2'-Deoxy-2'-fluoronucleoside
  modified_base (13)..(13): 2'-O-methylnucleoside
  modified_base (14)..(14): 2'-Deoxy-2'-fluoronucleoside
  modified_base (15)..(15): 2'-O-methylnucleoside
  modified_base (16)..(16): 2'-Deoxy-2'-fluoronucleoside
  modified_base (17)..(17): 2'-O-methylnucleoside
  modified_base (18)..(18): 2'-Deoxy-2'-fluoronucleoside
  modified_base (19)..(19): 2'-O-methylnucleoside
  modified_base (20)..(20): 2'-Deoxy-2'-fluoronucleoside
  modified_base (21)..(21): 2'-O-methylnucleoside
  modified_base (22)..(22): 2'-Deoxy-2'-fluoronucleoside
  modified_base (23)..(23): 2'-O-methylnucleoside
acuugccaaggaaaaucaccagg

SEQ ID NO: 2951 - RNA, 23 nt, Artificial Sequence
  siRNA antisense strand against MASP2
  modified_base (1)..(1): 2'-Deoxy-2'-fluoronucleoside
  modified_base (2)..(2): 2'-O-methylnucleoside
  modified_base (3)..(3): 2'-Deoxy-2'-fluoronucleoside
  modified_base (4)..(4): 2'-O-methylnucleoside
  modified_base (5)..(5): 2'-Deoxy-2'-fluoronucleoside
  modified_base (6)..(6): 2'-O-methylnucleoside
  modified_base (7)..(7): 2'-Deoxy-2'-fluoronucleoside
  modified_base (8)..(8): 2'-O-methylnucleoside
  modified_base (9)..(9): 2'-Deoxy-2'-fluoronucleoside
  modified_base (10)..(10): 2'-O-methylnucleoside
  modified_base (11)..(11): 2'-O-methylnucleoside
  modified_base (12)..(12): 2'-Deoxy-2'-fluoronucleoside
  modified_base (13)..(13): 2'-O-methylnucleoside
  modified_base (14)..(14): 2'-Deoxy-2'-fluoronucleoside
  modified_base (15)..(15): 2'-O-methylnucleoside
  modified_base (16)..(16): 2'-Deoxy-2'-fluoronucleoside
  modified_base (17)..(17): 2'-O-methylnucleoside
  modified_base (18)..(18): 2'-Deoxy-2'-fluoronucleoside
  modified_base (19)..(19): 2'-O-methylnucleoside
  modified_base (20)..(20): 2'-Deoxy-2'-fluoronucleoside
  modified_base (21)..(21): 2'-O-methylnucleoside
  modified_base (22)..(22): 2'-Deoxy-2'-fluoronucleoside
  modified_base (23)..(23): 2'-O-methylnucleoside
auaucaggacuugccaaggaaaa

SEQ ID NO: 2952 - RNA, 23 nt, Artificial Sequence
  siRNA antisense strand against MASP2
  modified_base (1)..(1): 2'-Deoxy-2'-fluoronucleoside
  modified_base (2)..(2): 2'-O-methylnucleoside
  modified_base (3)..(3): 2'-Deoxy-2'-fluoronucleoside
  modified_base (4)..(4): 2'-O-methylnucleoside
  modified_base (5)..(5): 2'-Deoxy-2'-fluoronucleoside
  modified_base (6)..(6): 2'-O-methylnucleoside
  modified_base (7)..(7): 2'-Deoxy-2'-fluoronucleoside
  modified_base (8)..(8): 2'-O-methylnucleoside
  modified_base (9)..(9): 2'-Deoxy-2'-fluoronucleoside
  modified_base (10)..(10): 2'-O-methylnucleoside
  modified_base (11)..(11): 2'-O-methylnucleoside
  modified_base (12)..(12): 2'-Deoxy-2'-fluoronucleoside
  modified_base (13)..(13): 2'-O-methylnucleoside
  modified_base (14)..(14): 2'-Deoxy-2'-fluoronucleoside
  modified_base (15)..(15): 2'-O-methylnucleoside
  modified_base (16)..(16): 2'-Deoxy-2'-fluoronucleoside
  modified_base (17)..(17): 2'-O-methylnucleoside
  modified_base (18)..(18): 2'-Deoxy-2'-fluoronucleoside
  modified_base (19)..(19): 2'-O-methylnucleoside
  modified_base (20)..(20): 2'-Deoxy-2'-fluoronucleoside
  modified_base (21)..(21): 2'-O-methylnucleoside
  modified_base (22)..(22): 2'-Deoxy-2'-fluoronucleoside
  modified_base (23)..(23): 2'-O-methylnucleoside
ccuaauaucaggacuugccaagg

SEQ ID NO: 2953 - RNA, 23 nt, Artificial Sequence
  siRNA antisense strand against MASP2
  modified_base (1)..(1): 2'-Deoxy-2'-fluoronucleoside
  modified_base (2)..(2): 2'-O-methylnucleoside
  modified_base (3)..(3): 2'-Deoxy-2'-fluoronucleoside
  modified_base (4)..(4): 2'-O-methylnucleoside
  modified_base (5)..(5): 2'-Deoxy-2'-fluoronucleoside
  modified_base (6)..(6): 2'-O-methylnucleoside
  modified_base (7)..(7): 2'-Deoxy-2'-fluoronucleoside
  modified_base (8)..(8): 2'-O-methylnucleoside
  modified_base (9)..(9): 2'-Deoxy-2'-fluoronucleoside
  modified_base (10)..(10): 2'-O-methylnucleoside
  modified_base (11)..(11): 2'-O-methylnucleoside
  modified_base (12)..(12): 2'-Deoxy-2'-fluoronucleoside
  modified_base (13)..(13): 2'-O-methylnucleoside
  modified_base (14)..(14): 2'-Deoxy-2'-fluoronucleoside
  modified_base (15)..(15): 2'-O-methylnucleoside
  modified_base (16)..(16): 2'-Deoxy-2'-fluoronucleoside
  modified_base (17)..(17): 2'-O-methylnucleoside
  modified_base (18)..(18): 2'-Deoxy-2'-fluoronucleoside
  modified_base (19)..(19): 2'-O-methylnucleoside
  modified_base (20)..(20): 2'-Deoxy-2'-fluoronucleoside
  modified_base (21)..(21): 2'-O-methylnucleoside
  modified_base (22)..(22): 2'-Deoxy-2'-fluoronucleoside
  modified_base (23)..(23): 2'-O-methylnucleoside
ucauauaaaagugcaccugcugc

SEQ ID NO: 2954 - RNA, 23 nt, Artificial Sequence
  siRNA antisense strand against MASP2
  modified_base (1)..(1): 2'-Deoxy-2'-fluoronucleoside
  modified_base (2)..(2): 2'-O-methylnucleoside
  modified_base (3)..(3): 2'-Deoxy-2'-fluoronucleoside
  modified_base (4)..(4): 2'-O-methylnucleoside
  modified_base (5)..(5): 2'-Deoxy-2'-fluoronucleoside
  modified_base (6)..(6): 2'-O-methylnucleoside
  modified_base (7)..(7): 2'-Deoxy-2'-fluoronucleoside
  modified_base (8)..(8): 2'-O-methylnucleoside
  modified_base (9)..(9): 2'-Deoxy-2'-fluoronucleoside
  modified_base (10)..(10): 2'-O-methylnucleoside
  modified_base (11)..(11): 2'-O-methylnucleoside
  modified_base (12)..(12): 2'-Deoxy-2'-fluoronucleoside
  modified_base (13)..(13): 2'-O-methylnucleoside
  modified_base (14)..(14): 2'-Deoxy-2'-fluoronucleoside
  modified_base (15)..(15): 2'-O-methylnucleoside
  modified_base (16)..(16): 2'-Deoxy-2'-fluoronucleoside
  modified_base (17)..(17): 2'-O-methylnucleoside
  modified_base (18)..(18): 2'-Deoxy-2'-fluoronucleoside
  modified_base (19)..(19): 2'-O-methylnucleoside
  modified_base (20)..(20): 2'-Deoxy-2'-fluoronucleoside
  modified_base (21)..(21): 2'-O-methylnucleoside
  modified_base (22)..(22): 2'-Deoxy-2'-fluoronucleoside
  modified_base (23)..(23): 2'-O-methylnucleoside
ugucauauaaaagugcaccugcu

SEQ ID NO: 2955 - RNA, 23 nt, Artificial Sequence
  siRNA antisense strand against MASP2
  modified_base (1)..(1): 2'-Deoxy-2'-fluoronucleoside
  modified_base (2)..(2): 2'-O-methylnucleoside
  modified_base (3)..(3): 2'-Deoxy-2'-fluoronucleoside
  modified_base (4)..(4): 2'-O-methylnucleoside
  modified_base (5)..(5): 2'-Deoxy-2'-fluoronucleoside
  modified_base (6)..(6): 2'-O-methylnucleoside
  modified_base (7)..(7): 2'-Deoxy-2'-fluoronucleoside
  modified_base (8)..(8): 2'-O-methylnucleoside
  modified_base (9)..(9): 2'-Deoxy-2'-fluoronucleoside
  modified_base (10)..(10): 2'-O-methylnucleoside
  modified_base (11)..(11): 2'-O-methylnucleoside
  modified_base (12)..(12): 2'-Deoxy-2'-fluoronucleoside
  modified_base (13)..(13): 2'-O-methylnucleoside
  modified_base (14)..(14): 2'-Deoxy-2'-fluoronucleoside
  modified_base (15)..(15): 2'-O-methylnucleoside
  modified_base (16)..(16): 2'-Deoxy-2'-fluoronucleoside
  modified_base (17)..(17): 2'-O-methylnucleoside
  modified_base (18)..(18): 2'-Deoxy-2'-fluoronucleoside
  modified_base (19)..(19): 2'-O-methylnucleoside
  modified_base (20)..(20): 2'-Deoxy-2'-fluoronucleoside
  modified_base (21)..(21): 2'-O-methylnucleoside
  modified_base (22)..(22): 2'-Deoxy-2'-fluoronucleoside
  modified_base (23)..(23): 2'-O-methylnucleoside
agacggcaugagcagcuguuagg

SEQ ID NO: 2956 - RNA, 23 nt, Artificial Sequence
  siRNA antisense strand against MASP2
  modified_base (1)..(1): 2'-Deoxy-2'-fluoronucleoside
  modified_base (2)..(2): 2'-O-methylnucleoside
  modified_base (3)..(3): 2'-Deoxy-2'-fluoronucleoside
  modified_base (4)..(4): 2'-O-methylnucleoside
  modified_base (5)..(5): 2'-Deoxy-2'-fluoronucleoside
  modified_base (6)..(6): 2'-O-methylnucleoside
  modified_base (7)..(7): 2'-Deoxy-2'-fluoronucleoside
  modified_base (8)..(8): 2'-O-methylnucleoside
  modified_base (9)..(9): 2'-Deoxy-2'-fluoronucleoside
  modified_base (10)..(10): 2'-O-methylnucleoside
  modified_base (11)..(11): 2'-O-methylnucleoside
  modified_base (12)..(12): 2'-Deoxy-2'-fluoronucleoside
  modified_base (13)..(13): 2'-O-methylnucleoside
  modified_base (14)..(14): 2'-Deoxy-2'-fluoronucleoside
  modified_base (15)..(15): 2'-O-methylnucleoside
  modified_base (16)..(16): 2'-Deoxy-2'-fluoronucleoside
  modified_base (17)..(17): 2'-O-methylnucleoside
  modified_base (18)..(18): 2'-Deoxy-2'-fluoronucleoside
  modified_base (19)..(19): 2'-O-methylnucleoside
  modified_base (20)..(20): 2'-Deoxy-2'-fluoronucleoside
  modified_base (21)..(21): 2'-O-methylnucleoside
  modified_base (22)..(22): 2'-Deoxy-2'-fluoronucleoside
  modified_base (23)..(23): 2'-O-methylnucleoside
uuuucagggugcccauucgaaug

SEQ ID NO: 2957 - RNA, 23 nt, Artificial Sequence
  siRNA antisense strand against MASP2
  modified_base (1)..(1): 2'-Deoxy-2'-fluoronucleoside
  modified_base (2)..(2): 2'-O-methylnucleoside
  modified_base (3)..(3): 2'-Deoxy-2'-fluoronucleoside
  modified_base (4)..(4): 2'-O-methylnucleoside
  modified_base (5)..(5): 2'-Deoxy-2'-fluoronucleoside
  modified_base (6)..(6): 2'-O-methylnucleoside
  modified_base (7)..(7): 2'-Deoxy-2'-fluoronucleoside
  modified_base (8)..(8): 2'-O-methylnucleoside
  modified_base (9)..(9): 2'-Deoxy-2'-fluoronucleoside
  modified_base (10)..(10): 2'-O-methylnucleoside
  modified_base (11)..(11): 2'-O-methylnucleoside
  modified_base (12)..(12): 2'-Deoxy-2'-fluoronucleoside
  modified_base (13)..(13): 2'-O-methylnucleoside
  modified_base (14)..(14): 2'-Deoxy-2'-fluoronucleoside
  modified_base (15)..(15): 2'-O-methylnucleoside
  modified_base (16)..(16): 2'-Deoxy-2'-fluoronucleoside
  modified_base (17)..(17): 2'-O-methylnucleoside
  modified_base (18)..(18): 2'-Deoxy-2'-fluoronucleoside
  modified_base (19)..(19): 2'-O-methylnucleoside
  modified_base (20)..(20): 2'-Deoxy-2'-fluoronucleoside
  modified_base (21)..(21): 2'-O-methylnucleoside
  modified_base (22)..(22): 2'-Deoxy-2'-fluoronucleoside
  modified_base (23)..(23): 2'-O-methylnucleoside
aggugauagucuuuucagggugc

SEQ ID NO: 2958 - RNA, 23 nt, Artificial Sequence
  siRNA antisense strand against MASP2
  modified_base (1)..(1): 2'-Deoxy-2'-fluoronucleoside
  modified_base (2)..(2): 2'-O-methylnucleoside
  modified_base (3)..(3): 2'-Deoxy-2'-fluoronucleoside
  modified_base (4)..(4): 2'-O-methylnucleoside
  modified_base (5)..(5): 2'-Deoxy-2'-fluoronucleoside
  modified_base (6)..(6): 2'-O-methylnucleoside
  modified_base (7)..(7): 2'-Deoxy-2'-fluoronucleoside
  modified_base (8)..(8): 2'-O-methylnucleoside
  modified_base (9)..(9): 2'-Deoxy-2'-fluoronucleoside
  modified_base (10)..(10): 2'-O-methylnucleoside
  modified_base (11)..(11): 2'-O-methylnucleoside
  modified_base (12)..(12): 2'-Deoxy-2'-fluoronucleoside
  modified_base (13)..(13): 2'-O-methylnucleoside
  modified_base (14)..(14): 2'-Deoxy-2'-fluoronucleoside
  modified_base (15)..(15): 2'-O-methylnucleoside
  modified_base (16)..(16): 2'-Deoxy-2'-fluoronucleoside
  modified_base (17)..(17): 2'-O-methylnucleoside
  modified_base (18)..(18): 2'-Deoxy-2'-fluoronucleoside
  modified_base (19)..(19): 2'-O-methylnucleoside
  modified_base (20)..(20): 2'-Deoxy-2'-fluoronucleoside
  modified_base (21)..(21): 2'-O-methylnucleoside
  modified_base (22)..(22): 2'-Deoxy-2'-fluoronucleoside
  modified_base (23)..(23): 2'-O-methylnucleoside
aaagccagcaucaugaguauaac

SEQ ID NO: 2959 - RNA, 23 nt, Artificial Sequence
  siRNA antisense strand against MASP2
  modified_base (1)..(1): 2'-Deoxy-2'-fluoronucleoside
  modified_base (2)..(2): 2'-O-methylnucleoside
  modified_base (3)..(3): 2'-Deoxy-2'-fluoronucleoside
  modified_base (4)..(4): 2'-O-methylnucleoside
  modified_base (5)..(5): 2'-Deoxy-2'-fluoronucleoside
  modified_base (6)..(6): 2'-O-methylnucleoside
  modified_base (7)..(7): 2'-Deoxy-2'-fluoronucleoside
  modified_base (8)..(8): 2'-O-methylnucleoside
  modified_base (9)..(9): 2'-Deoxy-2'-fluoronucleoside
  modified_base (10)..(10): 2'-O-methylnucleoside
  modified_base (11)..(11): 2'-O-methylnucleoside
  modified_base (12)..(12): 2'-Deoxy-2'-fluoronucleoside
  modified_base (13)..(13): 2'-O-methylnucleoside
  modified_base (14)..(14): 2'-Deoxy-2'-fluoronucleoside
  modified_base (15)..(15): 2'-O-methylnucleoside
  modified_base (16)..(16): 2'-Deoxy-2'-fluoronucleoside
  modified_base (17)..(17): 2'-O-methylnucleoside
  modified_base (18)..(18): 2'-Deoxy-2'-fluoronucleoside
  modified_base (19)..(19): 2'-O-methylnucleoside
  modified_base (20)..(20): 2'-Deoxy-2'-fluoronucleoside
  modified_base (21)..(21): 2'-O-methylnucleoside
  modified_base (22)..(22): 2'-Deoxy-2'-fluoronucleoside
  modified_base (23)..(23): 2'-O-methylnucleoside
ucaaagccagcaucaugaguaua

SEQ ID NO: 2960 - RNA, 23 nt, Artificial Sequence
  siRNA antisense strand against MASP2
  modified_base (1)..(1): 2'-Deoxy-2'-fluoronucleoside
  modified_base (2)..(2): 2'-O-methylnucleoside
  modified_base (3)..(3): 2'-Deoxy-2'-fluoronucleoside
  modified_base (4)..(4): 2'-O-methylnucleoside
  modified_base (5)..(5): 2'-Deoxy-2'-fluoronucleoside
  modified_base (6)..(6): 2'-O-methylnucleoside
  modified_base (7)..(7): 2'-Deoxy-2'-fluoronucleoside
  modified_base (8)..(8): 2'-O-methylnucleoside
  modified_base (9)..(9): 2'-Deoxy-2'-fluoronucleoside
  modified_base (10)..(10): 2'-O-methylnucleoside
  modified_base (11)..(11): 2'-O-methylnucleoside
  modified_base (12)..(12): 2'-Deoxy-2'-fluoronucleoside
  modified_base (13)..(13): 2'-O-methylnucleoside
  modified_base (14)..(14): 2'-Deoxy-2'-fluoronucleoside
  modified_base (15)..(15): 2'-O-methylnucleoside
  modified_base (16)..(16): 2'-Deoxy-2'-fluoronucleoside
  modified_base (17)..(17): 2'-O-methylnucleoside
  modified_base (18)..(18): 2'-Deoxy-2'-fluoronucleoside
  modified_base (19)..(19): 2'-O-methylnucleoside
  modified_base (20)..(20): 2'-Deoxy-2'-fluoronucleoside
  modified_base (21)..(21): 2'-O-methylnucleoside
  modified_base (22)..(22): 2'-Deoxy-2'-fluoronucleoside
  modified_base (23)..(23): 2'-O-methylnucleoside
uugucaaagccagcaucaugagu

SEQ ID NO: 2961 - RNA, 23 nt, Artificial Sequence
  siRNA antisense strand against MASP2
  modified_base (1)..(1): 2'-Deoxy-2'-fluoronucleoside
  modified_base (2)..(2): 2'-O-methylnucleoside
  modified_base (3)..(3): 2'-Deoxy-2'-fluoronucleoside
  modified_base (4)..(4): 2'-O-methylnucleoside
  modified_base (5)..(5): 2'-Deoxy-2'-fluoronucleoside
  modified_base (6)..(6): 2'-O-methylnucleoside
  modified_base (7)..(7): 2'-Deoxy-2'-fluoronucleoside
  modified_base (8)..(8): 2'-O-methylnucleoside
  modified_base (9)..(9): 2'-Deoxy-2'-fluoronucleoside
  modified_base (10)..(10): 2'-O-methylnucleoside
  modified_base (11)..(11): 2'-O-methylnucleoside
  modified_base (12)..(12): 2'-Deoxy-2'-fluoronucleoside
  modified_base (13)..(13): 2'-O-methylnucleoside
  modified_base (14)..(14): 2'-Deoxy-2'-fluoronucleoside
  modified_base (15)..(15): 2'-O-methylnucleoside
  modified_base (16)..(16): 2'-Deoxy-2'-fluoronucleoside
  modified_base (17)..(17): 2'-O-methylnucleoside
  modified_base (18)..(18): 2'-Deoxy-2'-fluoronucleoside
  modified_base (19)..(19): 2'-O-methylnucleoside
  modified_base (20)..(20): 2'-Deoxy-2'-fluoronucleoside
  modified_base (21)..(21): 2'-O-methylnucleoside
  modified_base (22)..(22): 2'-Deoxy-2'-fluoronucleoside
  modified_base (23)..(23): 2'-O-methylnucleoside
cauugucaaagccagcaucauga

SEQ ID NO: 2962 - RNA, 23 nt, Artificial Sequence
  siRNA antisense strand against MASP2
  modified_base (1)..(1): 2'-Deoxy-2'-fluoronucleoside
  modified_base (2)..(2): 2'-O-methylnucleoside
  modified_base (3)..(3): 2'-Deoxy-2'-fluoronucleoside
  modified_base (4)..(4): 2'-O-methylnucleoside
  modified_base (5)..(5): 2'-Deoxy-2'-fluoronucleoside
  modified_base (6)..(6): 2'-O-methylnucleoside
  modified_base (7)..(7): 2'-Deoxy-2'-fluoronucleoside
  modified_base (8)..(8): 2'-O-methylnucleoside
  modified_base (9)..(9): 2'-Deoxy-2'-fluoronucleoside
  modified_base (10)..(10): 2'-O-methylnucleoside
  modified_base (11)..(11): 2'-O-methylnucleoside
  modified_base (12)..(12): 2'-Deoxy-2'-fluoronucleoside
  modified_base (13)..(13): 2'-O-methylnucleoside
  modified_base (14)..(14): 2'-Deoxy-2'-fluoronucleoside
  modified_base (15)..(15): 2'-O-methylnucleoside
  modified_base (16)..(16): 2'-Deoxy-2'-fluoronucleoside
  modified_base (17)..(17): 2'-O-methylnucleoside
  modified_base (18)..(18): 2'-Deoxy-2'-fluoronucleoside
  modified_base (19)..(19): 2'-O-methylnucleoside
  modified_base (20)..(20): 2'-Deoxy-2'-fluoronucleoside
  modified_base (21)..(21): 2'-O-methylnucleoside
  modified_base (22)..(22): 2'-Deoxy-2'-fluoronucleoside
  modified_base (23)..(23): 2'-O-methylnucleoside
ucauugucaaagccagcaucaug

SEQ ID NO: 2963 - RNA, 23 nt, Artificial Sequence
  siRNA antisense strand against MASP2
  modified_base (1)..(1): 2'-Deoxy-2'-fluoronucleoside
  modified_base (2)..(2): 2'-O-methylnucleoside
  modified_base (3)..(3): 2'-Deoxy-2'-fluoronucleoside
  modified_base (4)..(4): 2'-O-methylnucleoside
  modified_base (5)..(5): 2'-Deoxy-2'-fluoronucleoside
  modified_base (6)..(6): 2'-O-methylnucleoside
  modified_base (7)..(7): 2'-Deoxy-2'-fluoronucleoside
  modified_base (8)..(8): 2'-O-methylnucleoside
  modified_base (9)..(9): 2'-Deoxy-2'-fluoronucleoside
  modified_base (10)..(10): 2'-O-methylnucleoside
  modified_base (11)..(11): 2'-O-methylnucleoside
  modified_base (12)..(12): 2'-Deoxy-2'-fluoronucleoside
  modified_base (13)..(13): 2'-O-methylnucleoside
  modified_base (14)..(14): 2'-Deoxy-2'-fluoronucleoside
  modified_base (15)..(15): 2'-O-methylnucleoside
  modified_base (16)..(16): 2'-Deoxy-2'-fluoronucleoside
  modified_base (17)..(17): 2'-O-methylnucleoside
  modified_base (18)..(18): 2'-Deoxy-2'-fluoronucleoside
  modified_base (19)..(19): 2'-O-methylnucleoside
  modified_base (20)..(20): 2'-Deoxy-2'-fluoronucleoside
  modified_base (21)..(21): 2'-O-methylnucleoside
  modified_base (22)..(22): 2'-Deoxy-2'-fluoronucleoside
  modified_base (23)..(23): 2'-O-methylnucleoside
ugucauugucaaagccagcauca

SEQ ID NO: 2964 - RNA, 23 nt, Artificial Sequence
  siRNA antisense strand against MASP2
  modified_base (1)..(1): 2'-Deoxy-2'-fluoronucleoside
  modified_base (2)..(2): 2'-O-methylnucleoside
  modified_base (3)..(3): 2'-Deoxy-2'-fluoronucleoside
  modified_base (4)..(4): 2'-O-methylnucleoside
  modified_base (5)..(5): 2'-Deoxy-2'-fluoronucleoside
  modified_base (6)..(6): 2'-O-methylnucleoside
  modified_base (7)..(7): 2'-Deoxy-2'-fluoronucleoside
  modified_base (8)..(8): 2'-O-methylnucleoside
  modified_base (9)..(9): 2'-Deoxy-2'-fluoronucleoside
  modified_base (10)..(10): 2'-O-methylnucleoside
  modified_base (11)..(11): 2'-O-methylnucleoside
  modified_base (12)..(12): 2'-Deoxy-2'-fluoronucleoside
  modified_base (13)..(13): 2'-O-methylnucleoside
  modified_base (14)..(14): 2'-Deoxy-2'-fluoronucleoside
  modified_base (15)..(15): 2'-O-methylnucleoside
  modified_base (16)..(16): 2'-Deoxy-2'-fluoronucleoside
  modified_base (17)..(17): 2'-O-methylnucleoside
  modified_base (18)..(18): 2'-Deoxy-2'-fluoronucleoside
  modified_base (19)..(19): 2'-O-methylnucleoside
  modified_base (20)..(20): 2'-Deoxy-2'-fluoronucleoside
  modified_base (21)..(21): 2'-O-methylnucleoside
  modified_base (22)..(22): 2'-Deoxy-2'-fluoronucleoside
  modified_base (23)..(23): 2'-O-methylnucleoside
augucauugucaaagccagcauc

SEQ ID NO: 2965 - RNA, 23 nt, Artificial Sequence
  siRNA antisense strand against MASP2
  modified_base (1)..(1): 2'-Deoxy-2'-fluoronucleoside
  modified_base (2)..(2): 2'-O-methylnucleoside
  modified_base (3)..(3): 2'-Deoxy-2'-fluoronucleoside
  modified_base (4)..(4): 2'-O-methylnucleoside
  modified_base (5)..(5): 2'-Deoxy-2'-fluoronucleoside
  modified_base (6)..(6): 2'-O-methylnucleoside
  modified_base (7)..(7): 2'-Deoxy-2'-fluoronucleoside
  modified_base (8)..(8): 2'-O-methylnucleoside
  modified_base (9)..(9): 2'-Deoxy-2'-fluoronucleoside
  modified_base (10)..(10): 2'-O-methylnucleoside
  modified_base (11)..(11): 2'-O-methylnucleoside
  modified_base (12)..(12): 2'-Deoxy-2'-fluoronucleoside
  modified_base (13)..(13): 2'-O-methylnucleoside
  modified_base (14)..(14): 2'-Deoxy-2'-fluoronucleoside
  modified_base (15)..(15): 2'-O-methylnucleoside
  modified_base (16)..(16): 2'-Deoxy-2'-fluoronucleoside
  modified_base (17)..(17): 2'-O-methylnucleoside
  modified_base (18)..(18): 2'-Deoxy-2'-fluoronucleoside
  modified_base (19)..(19): 2'-O-methylnucleoside
  modified_base (20)..(20): 2'-Deoxy-2'-fluoronucleoside
  modified_base (21)..(21): 2'-O-methylnucleoside
  modified_base (22)..(22): 2'-Deoxy-2'-fluoronucleoside
  modified_base (23)..(23): 2'-O-methylnucleoside
uaugucauugucaaagccagcau

SEQ ID NO: 2966 - RNA, 23 nt, Artificial Sequence
  siRNA antisense strand against MASP2
  modified_base (1)..(1): 2'-Deoxy-2'-fluoronucleoside
  modified_base (2)..(2): 2'-O-methylnucleoside
  modified_base (3)..(3): 2'-Deoxy-2'-fluoronucleoside
  modified_base (4)..(4): 2'-O-methylnucleoside
  modified_base (5)..(5): 2'-Deoxy-2'-fluoronucleoside
  modified_base (6)..(6): 2'-O-methylnucleoside
  modified_base (7)..(7): 2'-Deoxy-2'-fluoronucleoside
  modified_base (8)..(8): 2'-O-methylnucleoside
  modified_base (9)..(9): 2'-Deoxy-2'-fluoronucleoside
  modified_base (10)..(10): 2'-O-methylnucleoside
  modified_base (11)..(11): 2'-O-methylnucleoside
  modified_base (12)..(12): 2'-Deoxy-2'-fluoronucleoside
  modified_base (13)..(13): 2'-O-methylnucleoside
  modified_base (14)..(14): 2'-Deoxy-2'-fluoronucleoside
  modified_base (15)..(15): 2'-O-methylnucleoside
  modified_base (16)..(16): 2'-Deoxy-2'-fluoronucleoside
  modified_base (17)..(17): 2'-O-methylnucleoside
  modified_base (18)..(18): 2'-Deoxy-2'-fluoronucleoside
  modified_base (19)..(19): 2'-O-methylnucleoside
  modified_base (20)..(20): 2'-Deoxy-2'-fluoronucleoside
  modified_base (21)..(21): 2'-O-methylnucleoside
  modified_base (22)..(22): 2'-Deoxy-2'-fluoronucleoside
  modified_base (23)..(23): 2'-O-methylnucleoside
ugcuaugucauugucaaagccag

SEQ ID NO: 2967 - RNA, 23 nt, Artificial Sequence
  siRNA antisense strand against MASP2
  modified_base (1)..(1): 2'-Deoxy-2'-fluoronucleoside
  modified_base (2)..(2): 2'-O-methylnucleoside
  modified_base (3)..(3): 2'-Deoxy-2'-fluoronucleoside
  modified_base (4)..(4): 2'-O-methylnucleoside
  modified_base (5)..(5): 2'-Deoxy-2'-fluoronucleoside
  modified_base (6)..(6): 2'-O-methylnucleoside
  modified_base (7)..(7): 2'-Deoxy-2'-fluoronucleoside
  modified_base (8)..(8): 2'-O-methylnucleoside
  modified_base (9)..(9): 2'-Deoxy-2'-fluoronucleoside
  modified_base (10)..(10): 2'-O-methylnucleoside
  modified_base (11)..(11): 2'-O-methylnucleoside
  modified_base (12)..(12): 2'-Deoxy-2'-fluoronucleoside
  modified_base (13)..(13): 2'-O-methylnucleoside
  modified_base (14)..(14): 2'-Deoxy-2'-fluoronucleoside
  modified_base (15)..(15): 2'-O-methylnucleoside
  modified_base (16)..(16): 2'-Deoxy-2'-fluoronucleoside
  modified_base (17)..(17): 2'-O-methylnucleoside
  modified_base (18)..(18): 2'-Deoxy-2'-fluoronucleoside
  modified_base (19)..(19): 2'-O-methylnucleoside
  modified_base (20)..(20): 2'-Deoxy-2'-fluoronucleoside
  modified_base (21)..(21): 2'-O-methylnucleoside
  modified_base (22)..(22): 2'-Deoxy-2'-fluoronucleoside
  modified_base (23)..(23): 2'-O-methylnucleoside
ucagugcuaugucauugucaaag

SEQ ID NO: 2968 - RNA, 23 nt, Artificial Sequence
  siRNA antisense strand against MASP2
  modified_base (1)..(1): 2'-Deoxy-2'-fluoronucleoside
  modified_base (2)..(2): 2'-O-methylnucleoside
  modified_base (3)..(3): 2'-Deoxy-2'-fluoronucleoside
  modified_base (4)..(4): 2'-O-methylnucleoside
  modified_base (5)..(5): 2'-Deoxy-2'-fluoronucleoside
  modified_base (6)..(6): 2'-O-methylnucleoside
  modified_base (7)..(7): 2'-Deoxy-2'-fluoronucleoside
  modified_base (8)..(8): 2'-O-methylnucleoside
  modified_base (9)..(9): 2'-Deoxy-2'-fluoronucleoside
  modified_base (10)..(10): 2'-O-methylnucleoside
  modified_base (11)..(11): 2'-O-methylnucleoside
  modified_base (12)..(12): 2'-Deoxy-2'-fluoronucleoside
  modified_base (13)..(13): 2'-O-methylnucleoside
  modified_base (14)..(14): 2'-Deoxy-2'-fluoronucleoside
  modified_base (15)..(15): 2'-O-methylnucleoside
  modified_base (16)..(16): 2'-Deoxy-2'-fluoronucleoside
  modified_base (17)..(17): 2'-O-methylnucleoside
  modified_base (18)..(18): 2'-Deoxy-2'-fluoronucleoside
  modified_base (19)..(19): 2'-O-methylnucleoside
  modified_base (20)..(20): 2'-Deoxy-2'-fluoronucleoside
  modified_base (21)..(21): 2'-O-methylnucleoside
  modified_base (22)..(22): 2'-Deoxy-2'-fluoronucleoside
  modified_base (23)..(23): 2'-O-methylnucleoside
auuuaaucagugcuaugucauug

SEQ ID NO: 2969 - RNA, 23 nt, Artificial Sequence
  siRNA antisense strand against MASP2
  modified_base (1)..(1): 2'-Deoxy-2'-fluoronucleoside
  modified_base (2)..(2): 2'-O-methylnucleoside
  modified_base (3)..(3): 2'-Deoxy-2'-fluoronucleoside
  modified_base (4)..(4): 2'-O-methylnucleoside
  modified_base (5)..(5): 2'-Deoxy-2'-fluoronucleoside
  modified_base (6)..(6): 2'-O-methylnucleoside
  modified_base (7)..(7): 2'-Deoxy-2'-fluoronucleoside
  modified_base (8)..(8): 2'-O-methylnucleoside
  modified_base (9)..(9): 2'-Deoxy-2'-fluoronucleoside
  modified_base (10)..(10): 2'-O-methylnucleoside
  modified_base (11)..(11): 2'-O-methylnucleoside
  modified_base (12)..(12): 2'-Deoxy-2'-fluoronucleoside
  modified_base (13)..(13): 2'-O-methylnucleoside
  modified_base (14)..(14): 2'-Deoxy-2'-fluoronucleoside
  modified_base (15)..(15): 2'-O-methylnucleoside
  modified_base (16)..(16): 2'-Deoxy-2'-fluoronucleoside
  modified_base (17)..(17): 2'-O-methylnucleoside
  modified_base (18)..(18): 2'-Deoxy-2'-fluoronucleoside
  modified_base (19)..(19): 2'-O-methylnucleoside
  modified_base (20)..(20): 2'-Deoxy-2'-fluoronucleoside
  modified_base (21)..(21): 2'-O-methylnucleoside
  modified_base (22)..(22): 2'-Deoxy-2'-fluoronucleoside
  modified_base (23)..(23): 2'-O-methylnucleoside
auucaauuuaaucagugcuaugu

SEQ ID NO: 2970 - RNA, 23 nt, Artificial Sequence
  siRNA antisense strand against MASP2
  modified_base (1)..(1): 2'-Deoxy-2'-fluoronucleoside
  modified_base (2)..(2): 2'-O-methylnucleoside
  modified_base (3)..(3): 2'-Deoxy-2'-fluoronucleoside
  modified_base (4)..(4): 2'-O-methylnucleoside
  modified_base (5)..(5): 2'-Deoxy-2'-fluoronucleoside
  modified_base (6)..(6): 2'-O-methylnucleoside
  modified_base (7)..(7): 2'-Deoxy-2'-fluoronucleoside
  modified_base (8)..(8): 2'-O-methylnucleoside
  modified_base (9)..(9): 2'-Deoxy-2'-fluoronucleoside
  modified_base (10)..(10): 2'-O-methylnucleoside
  modified_base (11)..(11): 2'-O-methylnucleoside
  modified_base (12)..(12): 2'-Deoxy-2'-fluoronucleoside
  modified_base (13)..(13): 2'-O-methylnucleoside
  modified_base (14)..(14): 2'-Deoxy-2'-fluoronucleoside
  modified_base (15)..(15): 2'-O-methylnucleoside
  modified_base (16)..(16): 2'-Deoxy-2'-fluoronucleoside
  modified_base (17)..(17): 2'-O-methylnucleoside
  modified_base (18)..(18): 2'-Deoxy-2'-fluoronucleoside
  modified_base (19)..(19): 2'-O-methylnucleoside
  modified_base (20)..(20): 2'-Deoxy-2'-fluoronucleoside
  modified_base (21)..(21): 2'-O-methylnucleoside
  modified_base (22)..(22): 2'-Deoxy-2'-fluoronucleoside
  modified_base (23)..(23): 2'-O-methylnucleoside
auugauuacaacuuuguuauuca

SEQ ID NO: 2971 - RNA, 23 nt, Artificial Sequence
  siRNA antisense strand against MASP2
  modified_base (1)..(1): 2'-Deoxy-2'-fluoronucleoside
  modified_base (2)..(2): 2'-O-methylnucleoside
  modified_base (3)..(3): 2'-Deoxy-2'-fluoronucleoside
  modified_base (4)..(4): 2'-O-methylnucleoside
  modified_base (5)..(5): 2'-Deoxy-2'-fluoronucleoside
  modified_base (6)..(6): 2'-O-methylnucleoside
  modified_base (7)..(7): 2'-Deoxy-2'-fluoronucleoside
  modified_base (8)..(8): 2'-O-methylnucleoside
  modified_base (9)..(9): 2'-Deoxy-2'-fluoronucleoside
  modified_base (10)..(10): 2'-O-methylnucleoside
  modified_base (11)..(11): 2'-O-methylnucleoside
  modified_base (12)..(12): 2'-Deoxy-2'-fluoronucleoside
  modified_base (13)..(13): 2'-O-methylnucleoside
  modified_base (14)..(14): 2'-Deoxy-2'-fluoronucleoside
  modified_base (15)..(15): 2'-O-methylnucleoside
  modified_base (16)..(16): 2'-Deoxy-2'-fluoronucleoside
  modified_base (17)..(17): 2'-O-methylnucleoside
  modified_base (18)..(18): 2'-Deoxy-2'-fluoronucleoside
  modified_base (19)..(19): 2'-O-methylnucleoside
  modified_base (20)..(20): 2'-Deoxy-2'-fluoronucleoside
  modified_base (21)..(21): 2'-O-methylnucleoside
  modified_base (22)..(22): 2'-Deoxy-2'-fluoronucleoside
  modified_base (23)..(23): 2'-O-methylnucleoside
uguugcuauugauuacaacuuug

1. A double-stranded nucleic acid that decreases expression of MASP2 gene, which consists of a sense strand and an antisense strand, and comprises a double-stranded region of at least 11 base pairs, wherein an oligonucleotide strand having a strand length of at least 17 nucleotides and 30 nucleotides at most in the antisense strand is complementary to a target MASP2 mRNA sequence selected from the group described in Table 1-1 to Table 1-22.

2. The double-stranded nucleic acid according to claim 1, wherein the double-stranded region is composed of 11-27 base pairs, and the 2nd nucleotide from the 5′-terminus of the antisense strand complementary to the target MASP2 mRNA sequence selected from the group described in Tables 1-1 to Table 1-22 is complement to the 2nd ribonucleotide from the 3′-terminus of the target MASP2 mRNA sequence.

3. The double-stranded nucleic acid according to claim 1, wherein the 3′-terminus of the sense strand and the 5′-terminus of the antisense strand form a blunt end.

4. The double-stranded nucleic acid according to claim 3, wherein the sense strand is 21 nucleotides in length and the antisense strand is 23 nucleotides in length.

5. The double-stranded nucleic acid according to claim 1, wherein the sense strand is 21 nucleotides in length and the antisense strand is 21 nucleotides in length.

6. The double-stranded nucleic acid according to claim 5, wherein the 3′-terminal of the sense strand and the 3′-terminal of the antisense strand have an overhang.

7. The double-stranded nucleic acid according to claim 1, wherein the antisense strand comprises a sequence selected from the groups described in “antisense strand” in Table 1-1 to Table 1-22 and Table 2.

8. The double-stranded nucleic acid according to claim 1, wherein the sense strand comprises a sequence selected from the groups described in “sense strand” in Table 1-1 to Table 1-22 and Table 2.

9. The double-stranded nucleic acid according to claim 1, comprising a sequence of 1 pair of sense strand/antisense strand selected from the group consisting of the sense strands/antisense strands described in Table 1-1 to Table 1-22 and Table 2.

10. The double-stranded nucleic acid according to claim 1, comprising a 2′-modified nucleotide.

11. The double-stranded nucleic acid according to claim 10, wherein 50-100% of the nucleotides in the double strand region are 2′-modified nucleotides.

12. The double-stranded nucleic acid according to claim 1, comprising a ligand.

13. A single strand nucleic acid consisting only of an antisense strand in the double-stranded nucleic acid described in claim 1.

14. A pharmaceutical composition comprising the nucleic acid described in claim 1.

15. A method of treating a disorder mediated by abnormal complement lectin pathway, comprising a step of administering a therapeutically effective amount of the nucleic acid described in claim 1 or a pharmaceutical composition comprising the nucleic acid according to claim 1 to a human in need of such treatment.

16. The method according to claim 15, wherein the disorder is IgA nephropathy, membranous nephropathy, lupus nephropathy, C3 nephropathy, thrombotic thrombocytopenic purpura, thrombotic microangiopathy, atypical hemolytic uremic syndrome (aHUS), kidney disorder during ischemia or tissue injury during cerebral infarction.
